(19) United States
(12) Patent Application Publication
(10) Pub. No.: US 2024/0301385 A1
(43) Pub. Date: Sep. 12, 2024

(54) DNA MODIFYING ENZYMES AND ACTIVE FRAGMENTS AND VARIANTS THEREOF AND METHODS OF USE

(71) Applicant: LIFEEDIT THERAPEUTICS, INC., Durham, NC (US)

(72) Inventors: Tyson D. Bowen, Morrisville, NC (US); Alexandra Briner Crawley, Cary, NC (US); Tedd D. Elich, Durham, NC (US)

(73) Assignee: LIFEEDIT THERAPEUTICS, INC., Durham, NC (US)

(21) Appl. No.: 18/551,749

(22) PCT Filed: Mar. 22, 2022
(86) PCT No.: PCT/US2022/021271

§ 371 Date: Sep. 21, 2023

Related U.S. Application Data
(60) Provisional application No. 63/164,273, filed on Mar. 22, 2021.

(51) Int. Cl. C12N 9/78; C12N 9/22; C12N 15/63

(52) U.S. Cl. CPC C12N 9/78; C12N 9/22; C12N 15/63; C07K 2319/09; C12N 2310/20; C12Y 305/04001

(57) ABSTRACT

Compositions and methods comprising deaminase polypeptides for targeted editing of nucleic acids are provided. Compositions comprise deaminase polypeptides. Also provided are fusion proteins comprising a DNA-binding polypeptide and a deaminase of the invention. The fusion proteins include RNA-guided nucleases fused to deaminases, optionally in complex with guide RNAs. Compositions also include nucleic acid molecules encoding the deaminases or the fusion proteins. Vectors and host cells comprising the nucleic acid molecules encoding the deaminases or the fusion proteins are also provided.

### CROSS-REFERENCE TO RELATED APPLICATIONS

[0001] This application claims priority to U.S. Provisional Application No. 63/164,273, filed Mar. 22, 2021, which is incorporated by reference herein in its entirety.

### STATEMENT REGARDING THE SEQUENCE LISTING

[0002] The Sequence Listing associated with this application is provided in ASCII format in lieu of a paper copy, and is hereby incorporated by reference into the specification. The ASCII copy named L103438_1240WO_0134_1_SL.txt is 1,310,113 bytes in size, was created on Mar. 22, 2022, and is being submitted electronically via EFS-Web.

### FIELD OF THE INVENTION

[0003] The present invention relates to the field of molecular biology and gene editing.

### BACKGROUND OF THE INVENTION

[0004] Targeted genome editing or modification is rapidly becoming an important tool for basic and applied research. Initial methods involved engineering nucleases such as meganucleases, zinc finger fusion proteins or TALENs, requiring the generation of chimeric nucleases with engineered, programmable, sequence-specific DNA-binding domains specific for each particular target sequence. RNA-guided nucleases (RGNs), such as the Clustered Regularly Interspaced Short Palindromic Repeats (CRISPR)-associated (Cas) proteins of the CRISPR-Cas bacterial system, allow for the targeting of specific sequences by complexing the nucleases with guide RNA that specifically hybridizes with a particular target sequence. Producing target-specific guide RNAs is less costly and more efficient than generating chimeric nucleases for each target sequence. Such RNA-guided nucleases can be used to edit genomes through the introduction of a sequence-specific, double-stranded break that is repaired via error-prone non-homologous end-joining (NHEJ) to introduce a mutation at a specific genomic location.

[0005] Additionally, RGNs are useful for targeted DNA editing approaches. Targeted editing of nucleic acid sequences, for example targeted cleavage, to allow for introduction of a specific modification into genomic DNA, enables a highly nuanced approach to studying gene function and gene expression. RGNs may also be used to generate chimeric proteins which use the RNA-guided activity of the RGN in combination with a DNA modifying enzyme, such as a deaminase, for targeted base editing. Targeted editing may be deployed for targeting genetic diseases in humans or for introducing agronomically beneficial mutations in the genomes of crop plants. The development of genome editing tools provides new approaches to gene editing-based mammalian therapeutics and agrobiotechnology.

### BRIEF SUMMARY OF THE INVENTION

[0006] Compositions and methods for modifying a target DNA molecule are provided. The compositions find use in modifying a target DNA molecule of interest. Compositions provided comprise deaminase polypeptides. Also provided are fusion proteins comprising a nucleic acid molecule-binding polypeptide (e.g., DNA-binding polypeptide) and a deaminase polypeptide, and ribonucleoprotein complexes comprising a fusion protein comprising an RNA-guided nuclease and a deaminase polypeptide and ribonucleic acids. Compositions provided also include nucleic acid molecules encoding the deaminase polypeptides or the fusion proteins, and vectors and host cells comprising the nucleic acid molecules. The methods disclosed herein are drawn to binding a target sequence of interest within a target DNA molecule of interest and modifying the target DNA molecule of interest.

[0007] In a first aspect, the present disclosure provides a polypeptide comprising an amino acid sequence selected from the group consisting of: a) an amino acid sequence having at least 90% sequence identity to any one of SEQ ID NOs: 2 and 7-12; and b) an amino acid sequence having at least 95% sequence identity to SEQ ID NO: 4 or 6; wherein the polypeptide has deaminase activity.

[0008] In some embodiments of the above aspect, the polypeptide comprises an amino acid sequence having at least 95% sequence identity to any one of SEQ ID NOs: 2 and 7-12. In some embodiments, the polypeptide comprises an amino acid sequence having 100% sequence identity to any one of SEQ ID NOs: 2, 4, and 6-12. In some embodiments, the polypeptide is isolated.

[0009] In another aspect, the present disclosure provides a nucleic acid molecule comprising a polynucleotide encoding a deaminase polypeptide, wherein the deaminase is encoded by a nucleotide sequence selected from the group consisting of: a) a nucleotide sequence having at least 80% sequence identity to any one of SEQ ID NOs: 114-119; b) a nucleotide sequence having at least 95% sequence identity to any one of SEQ ID NOs: 109, 111, and 113; c) a nucleotide sequence encoding an amino acid sequence having at least 90% sequence identity to any one of SEQ ID NOs: 2 and 7-12; and d) a nucleotide sequence encoding an amino acid sequence having at least 95% sequence identity to SEQ ID NO: 4 or 6.

[0010] In some embodiments of the above aspect, the deaminase is encoded by a nucleotide sequence that has at least 90% sequence identity to any one of SEQ ID NOs: 114-119. In some embodiments, the deaminase is encoded by a nucleotide sequence that has at least 95% sequence identity to any one of SEQ ID NOs: 114-119. In some embodiments, the deaminase is encoded by a nucleotide sequence that has 100% sequence identity to any one of SEQ ID NOs: 109, 111, and 113-119. In some embodiments, the deaminase polypeptide has an amino acid sequence having at least 95% sequence identity to any one of SEQ ID NOs: 2 and 7-12. In some embodiments, the deaminase polypeptide has an amino acid sequence having 100% sequence identity to any one of SEQ ID NOs: 2, 4, and 6-12.

[0011] In some embodiments of the above aspect, the nucleic acid molecule further comprises a heterologous promoter operably linked to the polynucleotide. In some embodiments, the nucleic acid molecule is isolated.

[0012] In another aspect, the present disclosure provides a vector comprising a nucleic acid molecule described hereinabove.

[0013] In another aspect, the present disclosure provides a cell comprising a nucleic acid molecule or a vector described hereinabove. In some embodiments, the cell is a prokaryotic cell. In some embodiments, the cell is a eukaryotic cell. In some embodiments, the eukaryotic cell is a mammalian cell. In some embodiments, the mammalian cell is a human cell. In some embodiments, the human cell is an immune cell.

[0014] In some embodiments, the immune cell is a stem cell. In some embodiments, the stem cell is an induced pluripotent stem cell. In some embodiments, the eukaryotic cell is an insect or avian cell. In some embodiments, the eukaryotic cell is a fungal cell. In some embodiments, the eukaryotic cell is a plant cell.

[0015] In another aspect, the present disclosure provides a plant or a seed comprising a plant cell described hereinabove.

[0016] In another aspect, the present disclosure provides a pharmaceutical composition comprising a pharmaceutically acceptable carrier and a polypeptide, a nucleic acid molecule, a vector of embodiment 11, or a cell described hereinabove. In some embodiments, the pharmaceutically acceptable carrier is heterologous to the polypeptide or the nucleic acid molecule. In some embodiments, the pharmaceutically acceptable carrier is not naturally-occurring.

[0017] In another aspect, the present disclosure provides a method for making a deaminase comprising culturing a cell described hereinabove under conditions in which the deaminase is expressed.

[0018] In another aspect, the present disclosure provides a method for making a deaminase comprising introducing into a cell a nucleic acid molecule or vector described hereinabove and culturing the cell under conditions in which the deminase is expressed.

[0019] In some embodiments of the above aspects, the method further comprises purifying the deaminase.

[0020] In another aspect, the present disclosure provides a fusion protein comprising a DNA-binding polypeptide and a deaminase having an amino acid sequence selected from the group consisting of: a) an amino acid sequence having at least 90% sequence identity to any one of SEQ ID NOs: 2 and 7-12; and b) an amino acid sequence having at least 95% sequence identity to SEQ ID NO: 4 or 6. In some embodiments, the deaminase has at least 95% sequence identity to any one of SEQ ID NOs: 2 and 7-12. In some embodiments, the deaminase has 100% sequence identity to any one of SEQ ID NOs: 2, 4, and 6-12.

[0021] In some embodiments of the above aspect, the deaminase is a cytosine deaminase. In some embodiments, the DNA-binding polypeptide is a meganuclease, a zinc finger fusion protein, or a TALEN; or a variant of a meganuclease, a zinc finger fusion protein, or a TALEN, wherein the nuclease activity has been reduced or inhibited.

[0022] In some embodiments of the above aspect, the DNA-binding polypeptide is an RNA-guided, DNA-binding polypeptide. In some embodiments, the RNA-guided, DNA-binding polypeptide is an RNA-guided nuclease (RGN) polypeptide. In some embodiments, the RGN is a Type II or Type V CRISPR-Cas polypeptide. In some embodiments, the RGN is an RGN nickase. In some embodiments, the RGN nickase has an inactive RuvC domain. In some embodiments, the RGN is a nuclease-inactive RGN. In some embodiments, the RGN has an amino acid sequence having at least 90% sequence identity to any one of the RGN sequences in Table 1. In some embodiments, the RGN has an amino acid sequence having at least 95% sequence identity to any one of the RGN sequences in Table 1. In some embodiments, the RGN has an amino acid sequence of any one of the RGN sequences in Table 1. In some embodiments, the RGN has an amino acid sequence having at least 90% sequence identity to any one of SEQ ID NOs: 74, 82, 87, 106, and 107. In some embodiments, the RGN has an amino acid sequence having at least 95% sequence identity to any one of SEQ ID NOs: 74, 82, 87, 106, and 107. In some embodiments, the RGN has an amino acid sequence of any one of SEQ ID NOs: 74, 82, 87, 106, and 107.

[0023] In some embodiments of the above aspect, the RGN nickase has an amino acid sequence having at least 90% sequence identity to any one of SEQ ID NOs: 75 and 88-98. In some embodiments, the RGN nickase has an amino acid sequence having at least 95% sequence identity to any one of SEQ ID NOs: 75 and 88-98. In some embodiments, the RGN nickase has an amino acid sequence having any one of SEQ ID NOs: 75 and 88-98.

[0024] In some embodiments of the above aspect, the fusion protein further comprises at least one nuclear localization signal (NLS). In some embodiments, the deaminase is fused to the amino terminus of the DNA-binding polypeptide. In some embodiments, the deaminase is fused to the carboxyl terminus of the DNA-binding polypeptide. In some embodiments, the fusion protein further comprises a linker sequence between the DNA-binding polypeptide and the deaminase. In some embodiments, the linker sequence has an amino acid sequence set forth as SEQ ID NO: 78 or 79.

[0025] In some embodiments of the above aspect, the fusion protein further comprises a uracil stabilizing protein (USP). In some embodiments, the USP has the sequence set forth as SEQ ID NO: 81. In some embodiments, the fusion protein further comprises a linker sequence between the USP and the deaminase or the DNA-binding polypeptide. In some embodiments, the linker sequence between the USP and the deaminase or the DNA-binding polypeptide has an amino acid sequence set forth as SEQ ID NO: 120.

[0026] In some embodiments of the above aspect, the fusion protein has an amino acid sequence of any one of SEQ ID NOs: 67, 68, 146, and 147.

[0027] In another aspect, the present disclosure provides a nucleic acid molecule comprising a polynucleotide encoding a fusion protein comprising a DNA-binding polypeptide and a deaminase, wherein the deaminase is encoded by a nucleotide sequence selected from the group consisting of: a) a nucleotide sequence having at least 80% sequence identity to any one of SEQ ID NOs: 114-119; b) a nucleotide sequence having at least 95% sequence identity to any one of SEQ ID NOs: 109, 111, and 113; c) a nucleotide sequence encoding an amino acid sequence having at least 90% sequence identity to any one of SEQ ID NOs: 2 and 7-12; and d) a nucleotide sequence encoding an amino acid sequence having at least 95% sequence identity to SEQ ID NO: 4 or 6.

[0028] In some embodiments of the above aspect, the deaminase is encoded by a nucleotide sequence has at least 90% sequence identity to any one of SEQ ID NOs: 114-119. In some embodiments, the deaminase is encoded by a nucleotide sequence has at least 95% sequence identity to any one of SEQ ID NOs: 114-119. In some embodiments, the deaminase nucleotide sequence has 100% sequence identity to any one of SEQ ID NOs: 109, 111, and 113-119. In some embodiments, the deaminase nucleotide sequence encodes an amino acid sequence having at least 95% sequence identity to any one of SEQ ID NOs: 2 and 7-12. In some embodiments, the deaminase nucleotide sequence encodes an amino acid sequence having 100% sequence identity to any one of SEQ ID NOs: 2, 4, and 6-12.

[0029] In some embodiments of the above aspect, the deaminase is a cytosine deaminase. In some embodiments, the DNA-binding polypeptide is a meganuclease, a zinc finger fusion protein, or a TALEN; or a variant of a meganuclease, a zinc finger fusion protein, or a TALEN, wherein the nuclease activity has been reduced or inhibited.

[0030] In some embodiments of the above aspect, the DNA-binding polypeptide is an RNA-guided, DNA-binding polypeptide. In some embodiments, the RNA-guided, DNA-binding polypeptide is an RNA-guided nuclease (RGN) polypeptide. In some embodiments, the RGN is a Type II or Type V CRISPR-Cas polypeptide. In some embodiments, the RGN is an RGN nickase. In some embodiments, the RGN nickase has an inactive RuvC domain. In some embodiments, the RGN is a nuclease-inactive RGN.

[0031] In some embodiments of the above aspect, the RGN has an amino acid sequence having at least 90% sequence identity to any one of the RGN sequences in Table 1. In some embodiments, the RGN has an amino acid sequence having at least 95% sequence identity to any one of the RGN sequences in Table 1. In some embodiments, the RGN has an amino acid sequence of any one of the RGN sequences in Table 1. In some embodiments, the RGN has an amino acid sequence having at least 90% sequence identity to any one of SEQ ID NOs: 74, 82, 87, 106, and 107. In some embodiments, the RGN has an amino acid sequence having at least 95% sequence identity to any one of SEQ ID NOs: 74, 82, 87, 106, and 107. In some embodiments, the RGN has an amino acid sequence of any one of SEQ ID NOs: 74, 82, 87, 106, and 107.

[0032] In some embodiments of the above aspect, the RGN nickase has an amino acid sequence having at least 90% sequence identity to any one of SEQ ID NOs: 75 and 88-98. In some embodiments, the RGN nickase has an amino acid sequence having at least 95% sequence identity to any one of SEQ ID NOs: 75 and 88-98. In some embodiments, the RGN nickase has an amino acid sequence having any one of SEQ ID NOs: 75 and 88-98.

[0033] In some embodiments of the above aspect, the polynucleotide encoding the fusion protein is operably linked at its 5′ end to a promoter. In some embodiments, the polynucleotide encoding the fusion protein is operably linked at its 3′ end to a terminator. In some embodiments, the fusion protein comprises one or more nuclear localization signals.

[0034] In some embodiments of the above aspect, the fusion protein is codon optimized for expression in a eukaryotic cell. In some embodiments, the fusion protein is codon optimized for expression in a prokaryotic cell. In some embodiments, the deaminase is fused to the amino terminus of the DNA-binding polypeptide. In some embodiments, the deaminase is fused to the carboxyl terminus of the DNA-binding polypeptide.

[0035] In some embodiments of the above aspect, the fusion protein further comprises a linker sequence between the DNA-binding polypeptide and the deaminase. In some embodiments, the linker sequence has an amino acid sequence set forth as SEQ ID NO: 78 or 79. In some embodiments, the fusion protein further comprises a uracil stabilizing protein (USP). In some embodiments, the USP has the sequence set forth as SEQ ID NO: 81. In some embodiments, the fusion protein further comprises a linker sequence between the USP and the deaminase or the DNA-binding polypeptide. In some embodiments, the linker sequence between the USP and the deaminase or the DNA-binding polypeptide has an amino acid sequence set forth as SEQ ID NO: 120. In some embodiments, the fusion protein has an amino acid sequence set forth as any one of SEQ ID NOs: 67, 68, 146, and 147.

[0036] In another aspect, the present disclosure provides a vector comprising a nucleic acid molecule described hereinabove. In some embodiments, the vector further comprises at least one nucleotide sequence encoding a guide RNA (gRNA) capable of hybridizing to a target sequence. In some embodiments, the gRNA is a single guide RNA. In some embodiments, the gRNA is a dual guide RNA.

[0037] In another aspect, the present disclosure provides a cell comprising a fusion protein described hereinabove. In some embodiments, the cell further comprises a guide RNA. In some embodiments, the gRNA is a single guide RNA. In some embodiments, the gRNA is a dual guide RNA.

[0038] In another aspect, the present disclosure provides a cell comprising a nucleic acid molecule or a vector described hereinabove.

[0039] In some of the embodiments of the above aspects, the cell is a prokaryotic cell. In some embodiments of the above aspects, the cell is a eukaryotic cell. In some embodiments, the eukaryotic cell is a mammalian cell. In some embodiments, the mammalian cell is a human cell. In some embodiments, the human cell is an immune cell. In some embodiments, the immune cell is a stem cell. In some embodiments, the stem cell is an induced pluripotent stem cell. In some embodiments, the eukaryotic cell is an insect or avian cell. In some embodiments, the eukaryotic cell is a fungal cell. In some embodiments, the eukaryotic cell is a plant cell.

[0040] In another aspect, the present disclosure provides a plant or a seed comprising a cell described hereinabove.

[0041] In another aspect, the present disclosure provides a pharmaceutical composition comprising a pharmaceutically acceptable carrier and a fusion protein, nucleic acid molecule, vector, or a cell described hereinabove.

[0042] In another aspect, the present disclosure provides a method for making a fusion protein comprising culturing a cell described hereinabove under conditions in which the fusion protein is expressed.

[0043] In another aspect, the present disclosure provides a method for making a fusion protein comprising introducing into a cell a nucleic acid molecule or a vector described hereinabove and culturing the cell under conditions in which the fusion protein is expressed.

[0044] In some embodiments of the above aspects, the method further comprises purifying the fusion protein.

[0045] In another aspect, the present disclosure provides a method for making an RGN fusion ribonucleoprotein complex, comprising introducing into a cell a nucleic acid molecule described hereinabove and a nucleic acid molecule comprising an expression cassette encoding a guide RNA, or a vector described hereinabove, and culturing the cell under conditions in which the fusion protein and the gRNA are expressed and form an RGN fusion ribonucleoprotein complex. In some embodiments, the method further comprises purifying the RGN fusion ribonucleoprotein complex.

[0046] In another aspect, the present disclosure provides a system for modifying a target DNA molecule comprising a target DNA sequence, wherein the system comprises: a) a fusion protein or a nucleotide sequence encoding the fusion protein, wherein the fusion protein comprises an RNA-guided nuclease polypeptide (RGN) and a deaminase, wherein the deaminase has an amino acid sequence selected from the group consisting of: i) an amino acid sequence having at least 90% sequence identity to any one of SEQ ID NOs: 2 and 7-12; and ii) an amino acid sequence having at least 95% sequence identity to SEQ ID NO: 4 or 6; and b) one or more guide RNAs capable of hybridizing to the target DNA sequence or one or more nucleotide sequences encoding the one or more guide RNAs (gRNAs); and wherein the one or more guide RNAs are capable of forming a complex with the fusion protein in order to direct the fusion protein to bind to the target DNA sequence and modify the target DNA molecule.

[0047] In some embodiments of the above aspect, the deaminase has an amino acid sequence having at least 95% sequence identity to any one of SEQ ID NOs: 2 and 7-12. In some embodiments, the deaminase has an amino acid sequence having 100% sequence identity to any one of SEQ ID NOs: 2, 4, and 6-12. In some embodiments, at least one of the nucleotide sequence encoding the one or more guide RNAs and the nucleotide sequence encoding the fusion protein is operably linked to a promoter.

[0048] In some embodiments of the above aspect, the target DNA sequence is a eukaryotic target DNA sequence. In some embodiments, the target DNA sequence is located adjacent to a protospacer adjacent motif (PAM) that is recognized by the RGN.

[0049] In some embodiments of the above aspect, the target DNA molecule is within a cell. In some embodiments, the cell is a eukaryotic cell. In some embodiments, the eukaryotic cell is a plant cell. In some embodiments, the eukaryotic cell is a mammalian cell. In some embodiments, the mammalian cell is a human cell. In some embodiments, the human cell is an immune cell. In some embodiments, the immune cell is a stem cell. In some embodiments, the stem cell is an induced pluripotent stem cell. In some embodiments, the eukaryotic cell is an insect cell. In some embodiments, the cell is a prokaryotic cell.

[0050] In some embodiments of the above aspect, the RGN of the fusion protein is a Type II or Type V CRISPR-Cas polypeptide. In some embodiments, the RGN of the fusion protein has an amino acid sequence having at least 90% sequence identity to any one of the RGN sequences in Table 1. In some embodiments, the RGN of the fusion protein has an amino acid sequence having at least 95% sequence identity to any one of the RGN sequences in Table 1. In some embodiments, the RGN of the fusion protein has an amino acid sequence of any one of the RGN sequences in Table 1. In some embodiments, the RGN of the fusion protein has an amino acid sequence having at least 90% sequence identity to any one of SEQ ID NOs: 74, 82, 87, 106, and 107. In some embodiments, the RGN of the fusion protein has an amino acid sequence having at least 95% sequence identity to any one of SEQ ID NOs: 74, 82, 87, 106, and 107. In some embodiments, the RGN of the fusion protein has an amino acid sequence of any one of SEQ ID NOs: 74, 82, 87, 106, and 107.

[0051] In some embodiments of the above aspect, the RGN of the fusion protein is an RGN nickase. In some embodiments, the RGN nickase has an inactive RuvC domain. In some embodiments, the RGN nickase has an amino acid sequence having at least 90% sequence identity to any one of SEQ ID NOs: 75 and 88-98. In some embodiments, the RGN nickase has an amino acid sequence having at least 95% sequence identity to any one of SEQ ID NOs: 75 and 88-98. In some embodiments, the RGN nickase is any one of SEQ ID NOs: 75 and 88-98. In some embodiments, the RGN of the fusion protein is a nuclease-inactive RGN.

[0052] In some embodiments of the above aspect, the fusion protein comprises one or more nuclear localization signals. In some embodiments, the deaminase is fused to the amino terminus of the DNA-binding polypeptide. In some embodiments, the deaminase is fused to the carboxyl terminus of the DNA-binding polypeptide. In some embodiments, the fusion protein further comprises a linker sequence between the DNA-binding polypeptide and the deaminase. In some embodiments, the linker sequence has an amino acid sequence set forth as SEQ ID NO: 78 or 79.

[0053] In some embodiments of the above aspect, the fusion protein further comprises a uracil stabilizing protein (USP). In some embodiments, the USP has the sequence set forth as SEQ ID NO: 81. In some embodiments, the fusion protein further comprises a linker sequence between the USP and the deaminase or the DNA-binding polypeptide. In some embodiments, the linker sequence between the USP and the deaminase or the DNA-binding polypeptide has an amino acid sequence set forth as SEQ ID NO: 120.

[0054] In some embodiments of the above aspect, the fusion protein has an amino acid sequence set forth as any one of SEQ ID NOs: 67, 68, 146, and 147. In some embodiments, the fusion protein is codon optimized for expression in a eukaryotic cell. In some embodiments, the nucleotide sequences encoding the one or more guide RNAs and the nucleotide sequence encoding a fusion protein are located on one vector.

[0055] In another aspect, the present disclosure provides a ribonucleoprotein complex comprising at least one guide RNA and the fusion protein of a system described hereinabove.

[0056] In another aspect, the present disclosure provides a cell comprising a system or ribonucleoprotein complex described hereinabove. In some embodiments, the cell is a prokaryotic cell. In some embodiments, the cell is a eukaryotic cell. In some embodiments, the eukaryotic cell is a mammalian cell. In some embodiments, the mammalian cell is a human cell. In some embodiments, the human cell is an immune cell. In some embodiments, the immune cell is a stem cell. In some embodiments, the stem cell is an induced pluripotent stem cell. In some embodiments, the eukaryotic cell is an insect or avian cell. In some embodiments, the eukaryotic cell is a fungal cell. In some embodiments, the eukaryotic cell is a plant cell.

[0057] In another aspect, the present disclosure provides a plant or seed comprising a plant cell described hereinabove.

[0058] In another aspect, the present disclosure provides a pharmaceutical composition comprising a pharmaceutically acceptable carrier and a system, a ribonucleoprotein complex, or a cell described hereinabove.

[0059] In another aspect, the present disclosure provides a method for modifying a target DNA molecule comprising a target DNA sequence, wherein the method comprises delivering a system or a ribonucleoprotein complex described hereinabove to the target DNA molecule or a cell comprising the target DNA molecule.

[0060] In some embodiments of the above aspect, the modified target DNA molecule comprises a C>N mutation of at least one nucleotide within the target DNA molecule, wherein N is A, G, or T. In some embodiments, the modified target DNA molecule comprises an C>T mutation of at least one nucleotide within the target DNA molecule. In some embodiments, the modified target DNA molecule comprises an C>G mutation of at least one nucleotide within the target DNA molecule.

[0061] In another aspect, the present disclosure provides a method for modifying a target DNA molecule comprising a target sequence, wherein the method comprises: a) assembling an RGN-deaminase ribonucleotide complex in vitro by combining: i) one or more guide RNAs capable of hybridizing to the target DNA sequence; and ii) a fusion protein comprising an RNA-guided nuclease polypeptide (RGN), and at least one deaminase, wherein the deaminase has an amino acid sequence selected from the group consisting of: I) an amino acid sequence having at least 90% sequence identity to any one of SEQ ID NOs: 2 and 7-12; and II) an amino acid sequence having at least 95% sequence identity to SEQ ID NO: 4 or 6; under conditions suitable for formation of the RGN-deaminase ribonucleotide complex; and b) contacting the target DNA molecule or a cell comprising the target DNA molecule with the in vitro-assembled RGN-deaminase ribonucleotide complex; wherein the one or more guide RNAs hybridize to the target DNA sequence, thereby directing the fusion protein to bind to the target DNA sequence and modification of the target DNA molecule occurs.

[0062] In some embodiments of the above aspect, the deaminase has an amino acid sequence having at least 95% sequence identity to any one of SEQ ID NOs: 2 and 7-12. In some embodiments, the deaminase has an amino acid sequence having 100% sequence identity to any one of SEQ ID NOs: 2, 4, and 6-12.

[0063] In some embodiments, the modified target DNA molecule comprises a C>N mutation of at least one nucleotide within the target DNA molecule, wherein N is A, G, or T. In some embodiments, the modified target DNA molecule comprises a C>T mutation of at least one nucleotide within the target DNA molecule. In some embodiments, the modified target DNA molecule comprises a C>G mutation of at least one nucleotide within the target DNA molecule.

[0064] In some embodiments of the above aspect, the RGN of the fusion protein is a Type II or Type V CRISPR-Cas polypeptide. In some embodiments, the RGN of the fusion protein has an amino acid sequence having at least 90% sequence identity to any one of the RGN sequences in Table 1. In some embodiments, the RGN of the fusion protein has an amino acid sequence having at least 95% sequence identity to any one of the RGN sequences in Table 1. In some embodiments, the RGN of the fusion protein has an amino acid sequence of any one of the RGN sequences in Table 1. In some embodiments, the RGN of the fusion protein has an amino acid sequence having at least 90% sequence identity to any one of SEQ ID NOs: 74, 82, 87, 106, and 107. In some embodiments, the RGN of the fusion protein has an amino acid sequence having at least 95% sequence identity to any one of SEQ ID NOs: 74, 82, 87, 106, and 107. In some embodiments, the RGN of the fusion protein has an amino acid sequence of any one of SEQ ID NOs: 74, 82, 87, 106, and 107.

[0065] In some embodiments of the above aspect, the RGN of the fusion protein is an RGN nickase. In some embodiments, the RGN nickase has an inactive RuvC domain. In some embodiments, the RGN nickase has an amino acid sequence having at least 90% sequence identity to any one of SEQ ID NOs: 75 and 88-98. In some embodiments, the RGN nickase has an amino acid sequence having at least 95% sequence identity to any one of SEQ ID NOs: 75 and 88-98. In some embodiments, the RGN nickase is any one of SEQ ID NOs: 75 and 88-98. In some embodiments, the RGN of the fusion protein is a nuclease-inactive RGN.

[0066] In some embodiments of the above aspect, the fusion protein comprises one or more nuclear localization signals. In some embodiments, the deaminase is fused to the amino terminus of the DNA-binding polypeptide. In some embodiments, the deaminase is fused to the carboxyl terminus of the DNA-binding polypeptide. In some embodiments, the fusion protein further comprises a linker sequence between the DNA-binding polypeptide and the deaminase. In some embodiments, the linker sequence has an amino acid sequence set forth as SEQ ID NO: 78 or 79.

[0067] In some embodiments of the above aspect, the fusion protein further comprises a uracil stabilizing protein (USP). In some embodiments, the USP has the sequence set forth as SEQ ID NO: 81. In some embodiments, the fusion protein further comprises a linker sequence between the USP and the deaminase or the DNA-binding polypeptide. In some embodiments, the linker sequence between the USP and the deaminase or the DNA-binding polypeptide has an amino acid sequence set forth as SEQ ID NO: 120.

[0068] In some embodiments of the above aspect, the fusion protein has an amino acid sequence set forth as any one of SEQ ID NOs: 67, 68, 146, and 147. In some embodiments, the target DNA sequence is a eukaryotic target DNA sequence. In some embodiments, the target DNA sequence is located adjacent to a protospacer adjacent motif (PAM).

[0069] In some embodiments of the above aspect, the target DNA molecule is within a cell. In some embodiments, the cell is a eukaryotic cell. In some embodiments, the eukaryotic cell is a plant cell. In some embodiments, the eukaryotic cell is a mammalian cell. In some embodiments, the mammalian cell is a human cell. In some embodiments, the human cell is an immune cell. In some embodiments, the immune cell is a stem cell. In some embodiments, the stem cell is an induced pluripotent stem cell. In some embodiments, the eukaryotic cell is an insect cell. In some embodiments, the cell is a prokaryotic cell.

[0070] In some embodiments of the above aspect, the method further comprises selecting a cell comprising the modified DNA molecule.

[0071] In another aspect, the present disclosure provides a cell comprising a modified target DNA sequence according to a method described hereinabove. In some embodiments, the cell is a eukaryotic cell. In some embodiments, the eukaryotic cell is a mammalian cell. In some embodiments, the mammalian cell is a human cell. In some embodiments, the human cell is an immune cell. In some embodiments, the immune cell is a stem cell. In some embodiments, the stem cell is an induced pluripotent stem cell. In some embodiments, the eukaryotic cell is an insect cell. In some embodiments, the cell is a prokaryotic cell. In some embodiments, the eukaryotic cell is a plant cell.

[0072] In another aspect, the present disclosure provides a plant or a seed comprising a cell described hereinabove.

[0073] In another aspect, the present disclosure provides a pharmaceutical composition comprising a cell described hereinabove, and a pharmaceutically acceptable carrier.

[0074] In another aspect, the present disclosure provides a method for producing a genetically modified cell with a correction in a causal mutation for a genetically inherited disease, the method comprising introducing into the cell: a) a fusion protein or a polynucleotide encoding the fusion protein, wherein the fusion protein comprises an RNA-guided nuclease polypeptide (RGN) and a deaminase, wherein the deaminase has an amino acid sequence selected from the group consisting of: i) an amino acid sequence having at least 90% sequence identity to any one of SEQ ID NOs: 2 and 7-12; and ii) an amino acid sequence having at least 95% sequence identity to SEQ ID NO: 4 or 6; and b) one or more guide RNAs (gRNA) capable of hybridizing to a target DNA sequence, or a polynucleotide encoding the gRNA; whereby the fusion protein and gRNA target to the genomic location of the causal mutation and modify the genomic sequence to remove the causal mutation.

[0075] In some embodiments of the above aspect, the polynucleotide encoding the fusion protein is operably linked to a promoter active in the cell. In some embodiments, the polynucleotide encoding the gRNA is operably linked to a promoter active in the cell.

[0076] In some embodiments of the above aspect, the deaminase has an amino acid sequence having at least 95% sequence identity to any one of SEQ ID NOs: 2 and 7-12. In some embodiments, the deaminase has an amino acid sequence having 100% sequence identity to any one of SEQ ID NOs: 2, 4, and 6-12. In some embodiments, the RGN of the fusion protein is a Type II or Type V CRISPR-Cas polypeptide.

[0077] In some embodiments of the above aspect, the RGN of the fusion protein has an amino acid sequence having at least 90% sequence identity to any one of the RGN sequences in Table 1. In some embodiments, the RGN of the fusion protein has an amino acid sequence having at least 95% sequence identity to any one of the RGN sequences in Table 1. In some embodiments, the RGN of the fusion protein has an amino acid sequence of any one of the RGN sequences in Table 1.

[0078] In some embodiments of the above aspect, the RGN of the fusion protein is an RGN nickase. In some embodiments, the RGN nickase has an inactive RuvC domain. In some embodiments, the RGN nickase has an amino acid sequence having at least 90% sequence identity to any one of SEQ ID NOs: 75 and 88-98. In some embodiments, the RGN nickase has an amino acid sequence having at least 95% sequence identity to any one of SEQ ID NOs: 75 and 88-98. In some embodiments, the RGN nickase is any one of SEQ ID NOs: 75 and 88-98. In some embodiments, the RGN of the fusion protein is a nuclease-inactive RGN.

[0079] In some embodiments of the above aspect, the fusion protein comprises one or more nuclear localization signals. In some embodiments, the deaminase is fused to the amino terminus of the DNA-binding polypeptide. In some embodiments, the deaminase is fused to the carboxyl terminus of the DNA-binding polypeptide. In some embodiments, the fusion protein further comprises a linker sequence between the DNA-binding polypeptide and the deaminase. In some embodiments, the linker sequence has an amino acid sequence set forth as SEQ ID NO: 78 or 79.

[0080] In some embodiments of the above aspect, the fusion protein further comprises a uracil stabilizing protein (USP). In some embodiments, the USP has the sequence set forth as SEQ ID NO: 81. In some embodiments, the fusion protein further comprises a linker sequence between the USP and the deaminase or the DNA-binding polypeptide. In some embodiments, the linker sequence between the USP and the deaminase or the DNA-binding polypeptide has an amino acid sequence set forth as SEQ ID NO: 120.

[0081] In some embodiments of the above aspect, the fusion protein has an amino acid sequence set forth as any one of SEQ ID NOs: 67, 68, 146, and 147. In some embodiments, the genome modification comprises introducing a C>T mutation of at least one nucleotide within the target DNA sequence. In some embodiments, the genome modification comprises introducing a C>G mutation of at least one nucleotide within the target DNA sequence.

[0082] In some embodiments of the above aspect, the cell is an animal cell. In some embodiments, the animal cell is a mammalian cell. In some embodiments, the cell is derived from a dog, cat, mouse, rat, rabbit, horse, sheep, goat, cow, pig, or human.

[0083] In some embodiments of the above aspect, the correction of the causal mutation comprises correcting a nonsense mutation. In some embodiments, the genetically inherited disease is a disease listed in Table 23. In some embodiments, the gRNA further comprises a spacer sequence that targets any one of SEQ ID NOs: 122-144, or the complement thereof.

[0084] In another aspect, the present disclosure provides a composition comprising: a) a fusion protein comprising a DNA-binding polypeptide and a cytosine deaminase, or a nucleic acid molecule encoding the fusion protein; and b) a second cytosine deaminase or a nucleic acid molecule encoding the second deaminase, wherein the second deaminase has an amino acid sequence selected from the group consisting of: i) an amino acid sequence having at least 90% sequence identity to any one of SEQ ID NOs: 2 and 7-12; and ii) an amino acid sequence having at least 95% sequence identity to SEQ ID NO: 4 or 6.

[0085] In some embodiments of the above aspect, the second cytosine deaminase has at least 95% sequence identity to any one of SEQ ID NOs: 2 and 7-12. In some embodiments, the second cytosine deaminase has 100% sequence identity to any one of SEQ ID NOs: 2, 4, and 6-12.

[0086] In some embodiments of the above aspect, the first cytosine deaminase has an amino acid sequence selected from the group consisting of: a) an amino acid sequence having at least 90% sequence identity to any one of SEQ ID NOs: 2 and 7-12; and b) an amino acid sequence having at least 95% sequence identity to SEQ ID NO: 4 or 6. In some embodiments, the first cytosine deaminase has at least 95% sequence identity to any one of SEQ ID NOs: 2 and 7-12. In some embodiments, the first cytosine deaminase has 100% sequence identity to any one of SEQ ID NOs: 2, 4, and 6-12.

[0087] In some embodiments of the above aspect, the DNA-binding polypeptide is a meganuclease, a zinc finger fusion protein, or a TALEN; or a variant of a meganuclease, a zinc finger fusion protein, or a TALEN, wherein the nuclease activity has been reduced or inhibited. In some embodiments, the DNA-binding polypeptide is an RNA-guided, DNA-binding polypeptide. In some embodiments, the RNA-guided, DNA-binding polypeptide is an RNA-guided nuclease (RGN) polypeptide.

[0088] In some embodiments of the above aspect, the RGN is an RGN nickase. In some embodiments, the RGN is a nuclease-inactive RGN.

[0089] In another aspect, the present disclosure provides a vector comprising a nucleic acid molecule encoding a fusion protein and a nucleic acid molecule encoding a second cytosine deaminase, wherein the fusion protein comprises a DNA-binding polypeptide and a first cytosine deaminase, and wherein the second cytosine deaminase has an amino acid sequence selected from the group consisting of: a) an amino acid sequence having at least 90% sequence identity to any one of SEQ ID NOs: 2 and 7-12; and b) an amino acid sequence having at least 95% sequence identity to SEQ ID NO: 4 or 6.

[0090] In some embodiments of the above aspect, the second cytosine deaminase has at least 95% sequence identity to any one of SEQ ID NOs: 2 and 7-12. In some embodiments, the second cytosine deaminase has 100% sequence identity to any one of SEQ ID NOs: 2, 4, and 6-12.

[0091] In some embodiments of the above aspect, the first cytosine deaminase has an amino acid sequence selected from the group consisting of: a) an amino acid sequence having at least 90% sequence identity to any one of SEQ ID NOs: 2 and 7-12; and b) an amino acid sequence having at least 95% sequence identity to SEQ ID NO: 4 or 6.

[0092] In some embodiments of the above aspect, the first cytosine deaminase has at least 95% sequence identity to any one of SEQ ID NOs: 2 and 7-12. In some embodiments, the first cytosine deaminase has 100% sequence identity to any one of SEQ ID NOs: 2, 4, and 6-12. In some embodiments, the DNA-binding polypeptide is a meganuclease, a zinc finger fusion protein, or a TALEN; or a variant of a meganuclease, a zinc finger fusion protein, or a TALEN, wherein the nuclease activity has been reduced or inhibited. In some embodiments, the DNA-binding polypeptide is an RNA-guided, DNA-binding polypeptide. In some embodiments, the RNA-guided, DNA-binding polypeptide is an RNA-guided nuclease (RGN) polypeptide.

[0093] In some embodiments of the above aspect, the RGN is an RGN nickase. In some embodiments, the RGN is a nuclease-inactive RGN.

[0094] In another aspect, the present disclosure provides a cell comprising a vector described hereinabove.

[0095] In another aspect, the present disclosure provides a cell comprising: a) a fusion protein comprising a DNA-binding polypeptide and a first cytosine deaminase; or a nucleic acid molecule encoding the fusion protein; and b) a second cytosine deaminase or a nucleic acid molecule encoding the second cytosine deaminase, wherein the second cytosine deaminase has an amino acid sequence selected from the group consisting of: i) an amino acid sequence having at least 90% sequence identity to any one of SEQ ID NOs: 2 and 7-12; and ii) an amino acid sequence having at least 95% sequence identity to SEQ ID NO: 4 or 6.

[0096] In some embodiments of the above aspect, the second cytosine deaminase has at least 95% sequence identity to any one of SEQ ID NOs: 2 and 7-12. In some embodiments, the second cytosine deaminase has 100% sequence identity to any one of SEQ ID NOs: 2, 4, and 6-12.

[0097] In some embodiments of the above aspect, the first cytosine deaminase has an amino acid sequence selected from the group consisting of: a) an amino acid sequence having at least 90% sequence identity to any one of SEQ ID NOs: 2 and 7-12; and b) an amino acid sequence having at least 95% sequence identity to SEQ ID NO: 4 or 6. In some embodiments, the first cytosine deaminase has at least 95% sequence identity to any one of SEQ ID NOs: 2 and 7-12. In some embodiments, the first cytosine deaminase has 100% sequence identity to any one of SEQ ID NOs: 2, 4, and 6-12. In some embodiments, the DNA-binding polypeptide is a meganuclease, a zinc finger fusion protein, or a TALEN; or a variant of a meganuclease, a zinc finger fusion protein, or a TALEN, wherein the nuclease activity has been reduced or inhibited. In some embodiments, the DNA-binding polypeptide is an RNA-guided, DNA-binding polypeptide.

[0098] In some embodiments of the above aspect, the RNA-guided, DNA-binding polypeptide is an RNA-guided nuclease (RGN) polypeptide. In some embodiments, the RGN is an RGN nickase. In some embodiments, the RGN is a nuclease-inactive RGN.

[0099] In another aspect, the present disclosure provides a pharmaceutical composition comprising a pharmaceutically acceptable carrier and a composition, a vector, or a cell described hereinabove.

[0100] In another aspect, the present disclosure provides a method for treating a disease, wherein the method comprises administering to a subject in need thereof a fusion protein, a nucleic acid molecule, a vector, a cell, a system, a ribonucleoprotein complex, a composition, or a pharmaceutical composition described herein.

[0101] In some embodiments of the above aspect, the disease is associated with a causal mutation and the pharmaceutical composition corrects the causal mutation. In some embodiments, the disease is a disease a disease listed in Table 23.

[0102] In another aspect, the present disclosure provides a use of a fusion protein, a nucleic acid molecule, a vector, a cell, a system, a ribonucleoprotein complex, or a composition described herein for the treatment of a disease in a subject.

[0103] In some embodiments of the above aspect, the disease is associated with a causal mutation and the treating comprises correcting the causal mutation. In some embodiments, the disease is a disease listed in Table 23.

[0104] In another aspect, the present disclosure provides a use of a fusion protein, a nucleic acid molecule, a vector, a cell, a system, a ribonucleoprotein complex, or a composition for the manufacture of a medicament useful for treating a disease. In some embodiments, the disease is associated with a causal mutation and an effective amount of the medicament corrects the causal mutation. In some embodiments, the disease is a disease listed in Table 23.

### DETAILED DESCRIPTION

[0105] Many modifications and other embodiments of the inventions set forth herein will come to mind to one skilled in the art to which these inventions pertain having the benefit of the teachings presented in the foregoing descriptions. Therefore, it is to be understood that the inventions are not to be limited to the specific embodiments disclosed and that modifications and other embodiments are intended to be included within the scope of the appended claims. Although specific terms are employed herein, they are used in a generic and descriptive sense only and not for purposes of limitation.

### I. Overview

[0106] This disclosure provides cytosine deaminases and fusion proteins that comprise a nucleic acid molecule-binding polypeptide, such as a DNA-binding polypeptide, and a deaminase polypeptide. In certain embodiments, the DNA-binding polypeptide is a sequence-specific DNA-binding polypeptide, in that the DNA-binding polypeptide binds to a target sequence at a greater frequency than binding to a randomized background sequence. In some embodiments, the DNA-binding polypeptide is or is derived from a meganuclease, zinc finger fusion protein, or TALEN. In some embodiments, the fusion protein comprises an RNA-guided DNA-binding polypeptide and a deaminase polypeptide. In some embodiments, the RNA-guided DNA-binding polypeptide is an RNA-guided nuclease, such as a CRISPR-Cas (e.g., Cas9) polypeptide that binds to a guide RNA (also referred to as gRNA), which, in turn, binds a target nucleic acid sequence via strand hybridization.

[0107] The deaminase polypeptides disclosed herein can deaminate a nucleobase, such as, for example, cytosine. The deamination of a nucleobase by a deaminase can lead to a point mutation at the respective residue, which is referred to herein as “nucleic acid editing”, or “base editing”. Fusion proteins comprising an RNA-guided nuclease (RGN) polypeptide and a deaminase can thus be used for the targeted editing of nucleic acid sequences.

[0108] Such fusion proteins are useful for targeted editing of DNA in vitro, e.g., for the generation of genetically modified cells. These genetically modified cells may be plant cells or animal cells. Such fusion proteins may also be useful for the introduction of targeted mutations, e.g., for the correction of genetic defects in mammalian cells ex vivo, e.g., in cells obtained from a subject that are subsequently re-introduced into the same or another subject; and for the introduction of targeted mutations, e.g., the correction of genetic defects or the introduction of deactivating mutations in disease-associated genes in a mammalian subject. Such fusion proteins may also be useful for the introduction of targeted mutations in plant cells, e.g., for the introduction of beneficial or agronomically valuable traits or alleles.

[0109] The terms “protein,” “peptide,” and “polypeptide” are used interchangeably herein, and refer to a polymer of amino acid residues linked together by peptide (amide) bonds. The terms refer to a protein, peptide, or polypeptide of any size, structure, or function. Typically, a protein, peptide, or polypeptide will be at least three amino acids long. A protein, peptide, or polypeptide may refer to an individual protein or a collection of proteins. One or more of the amino acids in a protein, peptide, or polypeptide may be modified, for example, by the addition of a chemical entity such as a carbohydrate group, a hydroxyl group, a phosphate group, a farnesyl group, an isofarnesyl group, a fatty acid group, a linker for conjugation, functionalization, or other modification, etc. A protein, peptide, or polypeptide may also be a single molecule or may be a multi-molecular complex. A protein, peptide, or polypeptide may be just a fragment of a naturally occurring protein or peptide. A protein, peptide, or polypeptide may be naturally occurring, recombinant, or synthetic, or any combination thereof.

[0110] Any of the proteins provided herein may be produced by any method known in the art. For example, the proteins provided herein may be produced via recombinant protein expression and purification, which is especially suited for fusion proteins comprising a peptide linker. Methods for recombinant protein expression and purification are well known, and include those described by Green and Sambrook, Molecular Cloning: A Laboratory Manual (4th ed., Cold Spring Harbor Laboratory Press, Cold Spring Harbor, N.Y. (2012)), the entire contents of which are incorporated herein by reference.

### II. Deaminases

[0111] The term “deaminase” refers to an enzyme that catalyzes a deamination reaction. The deaminases of the invention are nucleobase deaminases and the terms “deaminase” and “nucleobase deaminase” are used interchangeably herein. The deaminase may be a naturally-occurring deaminase enzyme or an active fragment or variant thereof. A deaminase may be active on single-stranded nucleic acids, such as ssDNA or ssRNA, or on double-stranded nucleic acids, such as dsDNA or dsRNA. In some embodiments, the deaminase is only capable of deaminating ssDNA and does not act on dsDNA.

[0112] The presently disclosed methods and compositions comprise a cytosine deaminase that catalyzes the hydrolytic deamination of cytosine, cytidine, or deoxycytidine to uracil. Cytosine deaminases may work on either DNA or RNA, and typically operate on single-stranded nucleic acid molecules. In further embodiments, the cytosine deaminase is an apolipoprotein B mRNA-editing complex (APOBEC) family deaminase. In some embodiments, the deaminase is an APOBEC1 family deaminase. In some embodiments, the cytosine deaminase is an activation-induced cytidine deaminase (AID). In some embodiments, the deaminase is an ACF1/ASE deaminase. Additional suitable deaminase enzymes will be apparent to the skilled artisan based on this disclosure. A fusion protein comprising a DNA-binding polypeptide and a cytosine deaminase is referred to herein as a “C-base editor”, “cytosine base editor” or “CBE”. CBEs can convert a cytosine to uracil, which can be subsequently converted to thymine through DNA replication or repair. In some embodiments, a CBE converts a cytosine to a guanine or a cytosine to an adenine. Without being bound by any theory or mechanism of action, it is believed that conversion of a cytosine to a guanine or adenine by a cytosine base editor is due to the deamination of the cytosine into a uracil and the subsequent activity of a uracil DNA glycosylase during base excision repair of the uracil residue.

[0113] In some embodiments, the presently disclosed cytosine deaminases are used in combination with an adenine deaminase. In some embodiments, the adenine deaminase is an ADAT family deaminase or a variant thereof. Deamination of adenine, adenosine, or deoxyadenosine yields inosine, which is treated as guanine by polymerases. To date there are no known naturally occurring adenine deaminases that deaminate adenine in DNA. Several methods have been employed to evolve and optimize adenine deaminase acting on tRNA (ADAT) proteins to be active on DNA molecules in mammalian cells (Gaudelli et al, 2017; Koblan, L. W. et al, 2018, Nat Biotechnol 36, 843-846; Richter, M. F. et al, 2020, Nat Biotechnol, doi:10.1038/s41587-020-0562-8, each of which are incorporated by reference in their entirety herein). One such method uses a bacterial selection assay where only cells with the ability to activate antibiotic resistance through A:T>G:C conversions are able to survive. In some embodiments, the presently disclosed compositions and methods that comprise a presently disclosed cytosine deaminase further comprise an adenine deaminase set forth in U.S. Provisional Patent Application Nos. 63/077,089, filed Sep. 11, 2020, and 63/146,840, filed Feb. 8, 2021, and PCT International Application No. PCT/US2021/049853, filed Sep. 10, 2021, each of which is herein incorporated by reference in its entirety.

[0114] The present invention relates to cytosine deaminase polypeptides identified from bacteria and cytosine deaminases which were produced through the truncation of bacterial deaminases. Cytosine deaminases are presently disclosed and set forth as SEQ ID NOs: 2, 4, and 6-12. The deaminases of the invention may be used for the editing of DNA or RNA molecules. In some embodiments, the deaminases of the invention may be used for editing of ssDNA or ssRNA molecules. The cytosine deaminases described herein are useful as deaminases alone or as components in fusion proteins. A fusion protein comprising a DNA-targeting polypeptide and a cytosine deaminase polypeptide is referred to herein as a “C-based editor”, “cytosine base editor”, or a “CBE” and can be used for the targeted editing of nucleic acid sequences.

[0115] “Base editors” are fusion proteins comprising a DNA-targeting polypeptide, such as an RGN, and a deaminase. Cytosine base editors (CBEs) comprise a DNA-targeting protein, such as an RGN, and a cytosine deaminase. CBEs function through the deamination of cytosine into uracil on a DNA target molecule. Uracil is then subsequently converted to thymine through DNA replication or repair. In some embodiments, the presently disclosed cytosine deaminases or active variants or fragments thereof introduce C>N mutations in a DNA molecule, wherein N is A, G, or T. In some embodiments, the presently disclosed cytosine deaminases or fusion proteins comprising the same introduce C>T mutations in a DNA molecule. In some embodiments, the presently disclosed cytosine deaminases or fusion proteins comprising the same introduce C>G mutations in a DNA molecule.

[0116] In those embodiments wherein the deaminase has been targeted to a specific region of a nucleic acid molecule via fusion with a DNA-binding polypeptide, the mutation rate of cytosines within or adjacent to the target sequence to which the DNA-binding polypeptide binds can be measured using any method known in the art, including polymerase chain reaction (PCR), restriction fragment length polymorphism (RFLP), or DNA sequencing.

[0117] The presently disclosed deaminases or active variants or fragments thereof that retain deaminase activity may be introduced into the cell as part of a deaminase-DNA-binding polypeptide fusion, and/or may be co-expressed with a DNA-binding polypeptide-deaminase fusion, to increase the efficiency of introducing the desired C>N (wherein N is A, T, or G) mutation, such as a C>T or C>G mutation, in a target DNA molecule. The presently disclosed deaminases have the amino acid sequence of any of SEQ ID NOs: 2, 4, and 6-12 or a variant or fragment thereof retaining deaminase activity. In some embodiments, the deaminase has an amino acid sequence having at least 50%, at least 55%, at least 60%, at least 65%, at least 70%, at least 75%, at least 80%, at least 81%, at least 82%, at least 83%, at least 84%, at least 85%, at least 86%, at least 87%, at least 88%, at least 89%, at least 90%, at least 91%, at least 92%, at least 93%, at least 94%, at least 95%, at least 96%, at least 97%, at least 98%, or at least 99% identity to the amino acid sequence of any of SEQ ID NOs: 2, 4, and 6-12. In particular embodiments, the deaminase comprises an amino acid sequence having at least 80% sequence identity to any one of SEQ ID NOs: 2 and 7-12. In certain embodiments, the deaminase comprises an amino acid sequence having at least 95% sequence identity to SEQ ID NO: 4 or 6.

### III. Nucleic Acid Molecule-Binding Polypeptides

[0118] Some aspects of this disclosure provide fusion proteins that comprise a nucleic acid molecule-binding polypeptide and a deaminase polypeptide. While binding to and targeted editing of RNA molecules is contemplated by the present invention, in some embodiments, the nucleic acid molecule-binding polypeptide of the fusion protein is a DNA-binding polypeptide. Such fusion proteins are useful for targeted editing of DNA in vitro, ex vivo, or in vivo. These fusion proteins are active in mammalian cells and are useful for targeted editing of DNA molecules.

[0119] The term “fusion protein” as used herein refers to a hybrid polypeptide which comprises protein domains from at least two different proteins. A fusion protein may comprise more than one different domain, for example, a DNA-binding domain and a deaminase. In some embodiments, a fusion protein is in a complex with, or is in association with, a nucleic acid, e.g., RNA.

[0120] In some embodiments, the presently disclosed fusion proteins comprise a DNA-binding polypeptide. As used herein, the term “DNA-binding polypeptide” refers to any polypeptide which is capable of binding to DNA. In certain embodiments, the DNA-binding polypeptide portion of the presently disclosed fusion proteins binds to double-stranded DNA. In particular embodiments, the DNA-binding polypeptide binds to DNA in a sequence-specific manner. As used herein, the terms “sequence-specific” or “sequence-specific manner” refer to the selective interaction with a specific nucleotide sequence.

[0121] Two polynucleotide sequences can be considered to be substantially complementary when the two sequences hybridize to each other under stringent conditions. Likewise, a DNA-binding polypeptide is considered to bind to a particular target sequence in a sequence-specific manner if the DNA-binding polypeptide binds to its sequence under stringent conditions. By “stringent conditions” or “stringent hybridization conditions” is intended conditions under which the two polynucleotide sequences (or the polypeptide binds to its specific target sequence) will bind to each other to a detectably greater degree than to other sequences (e.g., at least 2-fold over background). Stringent conditions are sequence-dependent and will be different in different circumstances. Typically, stringent conditions will be those in which the salt concentration is less than 1.5 M Na ion, typically about 0.01 to 1.0 M Na ion concentration (or other salts) at pH 7.0 to 8.3, and the temperature is at least 30° C. for short sequences (e.g., 10 to 50 nucleotides) and at least 60° C. for long sequences (e.g., greater than 50 nucleotides). Stringent conditions may also be achieved with the addition of destabilizing agents such as formamide. Exemplary low stringency conditions include hybridization with a buffer solution of 30 to 35% formamide, 1 M NaCl, 1% SDS (sodium dodecyl sulfate) at 37° C., and a wash in 1× to 2×SSC (20×SSC=3.0 M NaCl/0.3 M trisodium citrate) at 50 to 55° C. Exemplary moderate stringency conditions include hybridization in 40 to 45% formamide, 1.0 M NaCl, 1% SDS at 37° C., and a wash in 0.5× to 1×SSC at 55 to 60° C. Exemplary high stringency conditions include hybridization in 50% formamide, 1 M NaCl, 1% SDS at 37° C., and a wash in 0.1×SSC at 60 to 65° C. Optionally, wash buffers may comprise about 0.1% to about 1% SDS. Duration of hybridization is generally less than about 24 hours, usually about 4 to about 12 hours. The duration of the wash time will be at least a length of time sufficient to reach equilibrium.

[0122] The Tm is the temperature (under defined ionic strength and pH) at which 50% of a complementary target sequence hybridizes to a perfectly matched sequence. For DNA-DNA hybrids, the Tm can be approximated from the equation of Meinkoth and Wahl (1984) Anal. Biochem. 138:267-284: Tm=81.5° C.+16.6 (log M)+0.41 (% GC)−0.61 (% form)−500/L; where M is the molarity of monovalent cations, % GC is the percentage of guanosine and cytosine nucleotides in the DNA, % form is the percentage of formamide in the hybridization solution, and L is the length of the hybrid in base pairs. Generally, stringent conditions are selected to be about 5° C. lower than the thermal melting point (Tm) for the specific sequence and its complement at a defined ionic strength and pH. However, severely stringent conditions can utilize a hybridization and/or wash at 1, 2, 3, or 4° C. lower than the thermal melting point (Tm); moderately stringent conditions can utilize a hybridization and/or wash at 6, 7, 8, 9, or 10° C. lower than the thermal melting point (Tm); low stringency conditions can utilize a hybridization and/or wash at 11, 12, 13, 14, 15, or 20° C. lower than the thermal melting point (Tm). Using the equation, hybridization and wash compositions, and desired Tm, those of ordinary skill will understand that variations in the stringency of hybridization and/or wash solutions are inherently described. An extensive guide to the hybridization of nucleic acids is found in Tijssen (1993) Laboratory Techniques in Biochemistry and Molecular Biology-Hybridization with Nucleic Acid Probes, Part I, Chapter 2 (Elsevier, New York); and Ausubel et al., eds. (1995) Current Protocols in Molecular Biology, Chapter 2 (Greene Publishing and Wiley-Interscience, New York). See Sambrook et al. (1989) Molecular Cloning: A Laboratory Manual (2d ed., Cold Spring Harbor Laboratory Press, Plainview, New York).

[0123] In certain embodiments, the sequence-specific DNA-binding polypeptide is an RNA-guided, DNA-binding polypeptide (RGDBP). As used herein, the terms “RNA-guided, DNA-binding polypeptide” and “RGDBP” refer to polypeptides capable of binding to DNA through the hybridization of an associated RNA molecule with the target DNA sequence.

[0124] In some embodiments, the DNA-binding polypeptide of the fusion protein is a nuclease, such as a sequence-specific nuclease. As used herein, the term “nuclease” refers to an enzyme that catalyzes the cleavage of phosphodiester bonds between nucleotides in a nucleic acid molecule. In some embodiments, the DNA-binding polypeptide is an endonuclease, which is capable of cleaving phosphodiester bonds between nucleotides within a nucleic acid molecule, whereas in certain embodiments, the DNA-binding polypeptide is an exonuclease that is capable of cleaving the nucleotides at either end (5′ or 3′) of a nucleic acid molecule. In some embodiments, the sequence-specific nuclease is selected from the group consisting of a meganuclease, a zinc finger nuclease, a TAL-effector DNA binding domain-nuclease fusion protein (TALEN), and an RNA-guided nuclease (RGN) or variants thereof wherein the nuclease activity has been reduced or inhibited.

[0125] As used herein, the term “meganuclease” or “homing endonuclease” refers to endonucleases that bind a recognition site within double-stranded DNA that is 12 to 40 bp in length. Non-limiting examples of meganucleases are those that belong to the LAGLIDADG family that comprise the conserved amino acid motif LAGLIDADG (SEQ ID NO: 85). The term “meganuclease” can refer to a dimeric or single-chain meganuclease.

[0126] As used herein, the term “zinc finger nuclease” or “ZFN” refers to a chimeric protein comprising a zinc finger DNA-binding domain and a nuclease domain.

[0127] As used herein, the term “TAL-effector DNA binding domain-nuclease fusion protein” or “TALEN” refers to a chimeric protein comprising a TAL effector DNA-binding domain and a nuclease domain.

[0128] In certain embodiments, the DNA-binding polypeptide is one which is capable of generating a single-stranded region within a double-stranded DNA molecule. An example of a single-stranded region is the single-stranded loop comprised within an R-loop, which is a three-stranded nucleic acid structure comprising a region of single-stranded DNA that is formed within a double-stranded DNA molecule that results from the hybridization of the complementary strand to a single-stranded RNA or DNA molecule. A cytosine within or adjacent to the single-stranded region of the R loop can be deaminated by a cytosine deaminase that has activity on single-stranded nucleic acids (e.g., ssDNA). In some of these embodiments, the DNA-binding polypeptide that is capable of generating an R-loop within a double-stranded DNA molecule is an RNA-guided DNA-binding polypeptide or a RGN nuclease. As used herein, the term “RNA-guided nuclease” or “RGN” refers to an RNA-guided, DNA-binding polypeptide that has nuclease activity. RGNs are considered “RNA-guided” because guide RNAs form a complex with the RNA-guided nucleases to direct the RNA-guided nuclease to bind to a target sequence and in some embodiments, introduce a single-stranded or double-stranded break at the target sequence.

[0129] In certain embodiments, the RGN is a nickase or nuclease-inactive RGN. The term “RGN polypeptide” encompasses RGN polypeptides that only cleave a single strand of a target nucleotide sequence, which is referred to herein as a nickase. Such RGNs have a single functioning nuclease domain. RGN nickases can be naturally-occurring nickases or can be RGN proteins that naturally cleave both strands of a double-stranded nucleic acid molecule that have been mutated within one or more nuclease domains such that the nuclease activity of these mutated domains is reduced or eliminated, to become a nickase.

[0130] In some embodiments, the nickase RGN of the fusion protein comprises a mutation (e.g., a D10A mutation, wherein amino acid numbering is based on the Streptococcus pyogenes Cas9 sequence set forth as SEQ ID NO: 99) which renders the RGN capable of cleaving only the non-base edited, target strand (the strand which comprises the PAM and is base paired to a gRNA) of a nucleic acid duplex. A nickase comprising a D10A mutation, or an equivalent mutation, has an inactivated RuvC nuclease domain and cleaves the targeted strand. D10A nickases are not able to cleave the non-targeted strand of the DNA, i.e., the strand where base editing is desired. In these embodiments, the RGN nicks the target strand, while the complementary, non-target strand is modified by the deaminase. Cellular DNA-repair machinery may repair the nicked, target strand using the modified non-target strand as a template, thereby introducing a mutation in the DNA.

[0131] Thus, in some of embodiments, the nickase comprises an inactive RuvC domain. RuvC domains have an RNase H fold structure (see, e.g., Nishimasu et al. (2014) Cell 156(5):935-949, which is incorporated by reference in its entirety). RuvC domains of RGNs are often split RuvC domains, comprising two or more non-adjacent regions within the linear amino acid sequence. For example, the RuvC domain of Streptococcus pyogenes Cas9 comprises amino acid residues 1-59, 718-769 and 909-1098 of SEQ ID NO: 99. A non-limiting example of a mutation within a RuvC domain that inactivates its nuclease activity is the D10A mutation that mutates the first aspartic acid residue in the split RuvC nuclease domain. The present application discloses several D10A nickase variants or homologous nickase variants of described RGNs wherein a RuvC domain is inactivated. nAPG07433.1 and nAPG08290.1 (set forth as SEQ ID NOs: 75 and 88, respectively) are nickase variants of APG07433.1 and APG08290.1, which are set forth as SEQ ID NO: 44 and 87, respectively, and are described in WO 2019/23566 (incorporated by reference in its entirety herein). nAPG07433.1-del and nAPG08290.1-del (set forth as SEQ ID NOs: 97 and 98, respectively) are deletion mutants of APG07433.1 and APG08290.1, respectively, and are described in U.S. Provisional Application Nos. 63/077,089, filed Sep. 11, 2020, and 63/146,840, filed Feb. 8, 2021, and PCT International Application No. PCT/US2021/049853, filed Sep. 10, 2021. nAPG00969 (set for as SEQ ID NO: 89) and nAPG09748 (set forth as SEQ ID NO: 90) are nickase variants of APG00969 and APG09748, respectively, which are described in WO 2020/139783 (incorporated by reference in its entirety herein). nAPG06646 (set forth as SEQ ID NO: 91) and nAPG09882 (set forth as SEQ ID NO: 92) are nickase variants of APG06646 and APG09882, respectively, which are described in PCT Publication No. WO 2021/030344 (incorporated by reference in its entirety herein). nAPG03850, nAPG07553, nAPG055886, and nAPG01604 are set forth as SEQ ID NOs: 93-96, respectively, and are nickase variants of APG03850, APG07553, APG055886, and APG01604 which are described in the pending U.S. Provisional Application Nos. 63/014,970 and 63/077,211 and PCT Publication No. WO 2021/21702 (each of which is incorporated by reference in its entirety herein).

[0132] In some embodiments, the nickase RGN of the fusion protein comprises a mutation (e.g., a H840A mutation, wherein amino acid numbering is based on the Streptococcus pyogenes Cas9 sequence set forth as SEQ ID NO: 99), which renders the RGN capable of cleaving only the base-edited, non-target strand (the strand which does not comprise the PAM and is not base paired to a gRNA) of a nucleic acid duplex. In some of these embodiments, the nickase comprises an inactive HNH nuclease domain. The HNH nuclease domain of RGNs have a ββα-metal fold (see, e.g., Nishimasu et al. 2014). The HNH nuclease domain of the Streptococcus pyogenes Cas9, for example, comprises amino acid residues 775-908 of SEQ ID NO: 99. A non-limiting example of a mutation within a HNH domain that inactivates its nuclease activity is the H840A mutation that mutates the first histidine of the HNH nuclease domain. The deaminase with an inactivated HNH domain acts on the non-target strand.

[0133] Methods for inactivating a RuvC and/or HNH domain of a RGN are known in the art and generally comprise mutating the first aspartic acid within a split RuvC domain and/or the first histidine of the HNH domain. Typically, the aspartic acid residue or histidine residue is mutated to an alanine. Other amino acid residues within the RuvC domain that can be mutated to inactivate nuclease activity of the domain include Glu762, His983, and Asp986 (typically to an alanine), wherein amino acid numbering is based on the Streptococcus pyogenes Cas9 sequence set forth as SEQ ID NO: 99. Other amino acid residues within the HNH domain that can be mutated include D839 and N863 (typically to an alanine), wherein amino acid numbering is based on the Streptococcus pyogenes Cas9 sequence set forth as SEQ ID NO: 99.

[0134] In some embodiments, the RGN of the fusion protein is nuclease dead. As used herein, an RGN protein that has been mutated to become nuclease-inactive or “dead” can be referred to as an RNA-guided, DNA-binding polypeptide or a nuclease-inactive RGN or nuclease-dead RGN. Methods for generating a nuclease-inactive RGN are known in the art and generally comprise mutating the sole nuclease domain or all of the nuclease domains of an RGN to render the nuclease domain(s) inactive. In those embodiments where the RGN only comprises a single nuclease domain (e.g., RuvC domain), the nuclease inactive variant will have at least one mutation within the RuvC domain that results in inactivation of the RuvC nuclease domain. In those embodiments wherein the RGN comprises more than one nuclease domain, such as a RuvC and an HNH domain, at least one mutation within each of the RuvC and the HNH domain renders both nuclease domains inactive.

[0135] One exemplary suitable nuclease-inactive RGN is the D10A/H840A Cas9 mutant (see, e.g., Qi et al., Cell. 2013; 152(5): 1173-83, the entire contents of which are incorporated herein by reference). Additionally, suitable nuclease-inactive variants of other known RNA guided nucleases (RGNs) can be determined (for example, a nuclease-inactive variant of the RGN APG08290.1 or RGN APG07433.1 disclosed in U.S. Patent Publication No. 2019/0367949, the entire contents of which are incorporated herein by reference herein, or dAPG09298 set forth as SEQ ID NO: 83).

[0136] Other additional exemplary suitable nuclease inactive RGN variants include, but are not limited to, D10A/D839A/H840A, and D10A/D839A/H840A/N863A mutant domains (See, e.g., Mali et al., Nature Biotechnology. 2013; 31(9): 833-838, the entire contents of which are incorporated herein by reference).

[0137] Additional suitable RGN proteins mutated to be nickases or inactive nucleases will be apparent to those of skill in the art based on this disclosure and knowledge in the field (such as for example the RGNs disclosed in PCT Publication No. WO 2019/236566, which is herein incorporated by reference in its entirety) and are within the scope of this disclosure.

[0138] In some embodiments the RGN nickase retaining nickase activity comprises an amino acid sequence that has at least 60%, at least 65%, at least 70%, at least 75%, at least 80%, at least 85%, at least 90%, at least 95%, at least 96%, at least 97%, at least 98%, at least 99%, or at least 99.5% identity to any one of SEQ ID NOs: 75 and 88-98.

[0139] Any method known in the art for introducing mutations into an amino acid sequence, such as PCR-mediated mutagenesis and site-directed mutagenesis, can be used for generating nickases or nuclease-dead RGNs. See, e.g., U.S. Publ. No. 2014/0068797 and U.S. Pat. No. 9,790,490; each of which is incorporated herein by reference in its entirety.

[0140] RNA-guided nucleases (RGNs) allow for the targeted manipulation of a single site within a genome and are useful in the context of gene targeting for therapeutic and research applications. In a variety of organisms, including mammals, RNA-guided nucleases have been used for genome engineering by stimulating either non-homologous end joining or homologous recombination. RGNs include CRISPR-Cas proteins, which are RNA-guided nucleases directed to the target sequence by a guide RNA (gRNA) as part of a Clustered Regularly Interspaced Short Palindromic Repeats (CRISPR) RNA-guided nuclease system, or active variants or fragments thereof.

[0141] Some aspects of this disclosure provide fusion proteins that comprise an RNA-guided DNA-binding polypeptide and a deaminase polypeptide, specifically a cytosine deaminase polypeptide. In some embodiments, the RNA-guided DNA-binding polypeptide is an RNA-guided nuclease (RGN). In further embodiments, the RNA-guided nuclease is a naturally-occurring CRISPR-Cas protein or an active variant or fragment thereof. CRISPR-Cas systems are classified into Class 1 or Class 2 systems. Class 2 systems comprise a single effector nuclease and include Types II, V, and VI. The Class 1 and 2 systems are subdivided into types (Types I, II, III, IV, V, VI), with some types further divided into subtypes (e.g., Type II-A, Type II-B, Type II-C, Type V-A, Type V-B).

[0142] In certain embodiments, the RGN is a naturally-occurring Type II CRISPR-Cas protein or an active variant or fragment thereof. As used herein, the term “Type II CRISPR-Cas protein,” “Type II CRISPR-Cas effector protein,” or “Type II RNA-guided nuclease” refers to an RGN that requires a trans-activating RNA (tracrRNA) and comprises two nuclease domains (i.e., RuvC and HNH), each of which is responsible for cleaving a single strand of a double-stranded DNA molecule. In some embodiments, the present invention provides a fusion protein comprising a presently disclosed deaminase fused to a Cas9 protein, such as Streptococcus pyogenes Cas9 (SpCas9) or a SpCas9 nickase, the sequences of which are set forth as SEQ ID NOs: 99 and 100, respectively, and are described in U.S. Pat. Nos. 10,000,772 and 8,697,359, each of which is herein incorporated by reference in its entirety. In some embodiments, the present invention provides a fusion protein comprising a presently disclosed deaminase fused to Streptococcus thermophilus Cas9 (StCas9) or a StCas9 nickase, the sequences of which are set forth as SEQ ID NOs: 101 and 102, respectively, and are disclosed in U.S. Pat. No. 10,113,167, which is herein incorporated by reference in its entirety. In some embodiments, the present invention provides a fusion protein comprising a presently disclosed deaminase fused to Streptococcus aureus Cas9 (SaCas9) or a SaCas9 nickase, the sequences of which are set forth as SEQ ID NOs: 103 and 104, respectively, and are disclosed in U.S. Pat. No. 9,752,132, which is herein incorporated by reference in its entirety.

[0143] In some embodiments, the CRISPR-Cas protein is a naturally-occurring Type V CRISPR-Cas protein or an active variant or fragment thereof. As used herein, the term “Type V CRISPR-Cas protein,” “Type V CRISPR-Cas effector protein,” or “Type V RNA-guided nuclease” refers to an RGN that cleaves dsDNA and comprises a single RuvC nuclease domain or a split-RuvC nuclease domain and lacks an HNH domain (Zetsche et al 2015, Cell doi:10.1016/j.cell.2015.09.038; Shmakov et al 2017, Nat Rev Microbiol doi:10.1038/nrmicro.2016.184; Yan et al 2018, Science doi:10.1126/science.aav7271; Harrington et al 2018, Science doi: 10.1126/science.aav4294). In some embodiments, a presently disclosed fusion protein comprises a Cas12 (e.g., Cas12a). It is to be noted that Cas12a is also referred to as Cpf1, and does not require a tracrRNA, although other Type V CRISPR-Cas proteins, such as Cas12b, do require a tracrRNA. Most Type V effectors can also target ssDNA (single-stranded DNA), often without a PAM requirement (Zetsche et al 2015; Yan et al 2018; Harrington et al 2018). The terms “Type V CRISPR-Cas protein” and “Type V RGN” encompasses the unique RGNs comprising split RuvC nuclease domains, such as those disclosed in U.S. Provisional Application Nos. 62/955,014 filed Dec. 30, 2019 and 63/058,169 filed Jul. 29, 2020, and PCT International Application No. PCT/US2020/067138 filed Dec. 28, 2020, the contents of each of which are incorporated herein by reference in its entirety. In some embodiments, the present invention provides a fusion protein comprising a presently disclosed deaminase fused to Francisella novicida Cas12a (FnCas12a), the sequence of which is set forth as SEQ ID NOs: 105 and is disclosed in U.S. Pat. No. 9,790,490, which is herein incorporated by reference in its entirety, or any of the nuclease-inactivating mutants of FnCas12a disclosed within U.S. Pat. No. 9,790,490.

[0144] In some embodiments, the CRISPR-Cas protein is a naturally-occurring Type VI CRISPR-Cas protein or an active variant or fragment thereof. As used herein, the term “Type VI CRISPR-Cas protein,” “Type VI CRISPR-Cas effector protein,” or “Type VI RGN” refers to a CRISPR-Cas effector protein that does not require a tracrRNA and comprises two HEPN domains that cleave RNA. In some embodiments, the present invention provides a fusion protein comprising a presently disclosed deaminase fused to a Cas13.

[0145] In particular embodiments, the presently disclosed fusion proteins comprise an RGN, or a nickase or nuclease-dead variant thereof, listed in Table 1. The guide RNA sequences (crRNA repeat and tracrRNA sequences) that can be used with each RGN of Table 1 are also provided, as well as the consensus PAM sequence. In certain embodiments, the fusion protein comprises an active variant of an RGN (one able to bind to a nucleic acid molecule in an RNA-guided manner) listed in Table 1 having between 80% and 99% or more sequence identity to any one of the amino acid sequences listed in Table 1 including but not limited to about or more than about 80%, about 81%, about 82%, about 83%, about 84%, about 85%, about 86%, about 87%, about 88%, about 89%, about 90%, about 91%, about 92%, about 93%, about 94%, about 95%, 5 about 96%, about 97%, about 98%, about 99%, or more. In particular embodiments, the fusion protein comprises an RGN having 80%, 81%, 82%, 83%, 84%, 85%, 86%, 87%, 88%, 89%, 90%, 91%, 92%, 93%, 94%, 95%, 96%, 97%, 98%, 99%, or more sequence identity to an RGN amino acid sequence disclosed in Table 1. In other embodiments, the fusion protein comprises a fragment of an RGN listed in Table 1 such as one that differs by as few as 1-15 amino acid residues, as few as 1-10, such as 6-10, as few as 5, as few as 4, as few as 3, as few as 2, or as few as 1 amino acid residue. In specific embodiments, the RGN comprises an N-terminal or a C-terminal truncation, which can comprise at least a deletion of 5, 10, 15, 20, 25, 30, 35, 40, 45, 50, 55, 60 amino acids or more from either the N or C terminus of the polypeptide. In some embodiments, the RGN comprises an internal deletion which can comprise at least a deletion of 1, 2, 3, 4, 5, 6, 7, 8, 9, 10, 11, 12, 13, 14, 15, 16, 17, 18, 19, 20, 25, 30, 35, 40, 45, 50, 55, 60 amino acids or more

TABLE 1
Non-limiting examples of RNA-guided nucleases

| | RGN SEQ | crRNA repeat | | |
|---|---|---|---|---|
| RGN Name | ID NO: | sequence | tracrRNA | PAM |
| APG05083.1 | 149 | 150 | 151 | 152 |
| APG07433.1 | 74 | 153 | 154 | 152 |
| APG07513.1 | 155 | 156 | 157 | 152 |
| APG08290.1 | 87 | 158 | 159 | 160 |
| APG05459.1 | 161 | 162 | 163 | 164 |
| APG04583.1 | 165 | 166 | 167 | 168 |
| APG01688.1 | 169 | 170 | 171 | 172 |
| APG00969 | 173 | 174 | 175 | 176 |
| APG03128 | 177 | 178 | 179 | 180 |
| APG09748 | 181 | 182 | 183 | 184 |
| APG00771 | 185 | 186 | 187 | 188 |
| APG02789 | 189 | 190 | 191 | 192 |
| APG09106 | 193 | 194 | 195 | 184 |
| APG05733.1 | 196 | 197 | 198 | 199 |
| APG06207.1 | 200 | 201 | 202 | 203 |
| APG01647.1 | 204 | 205 | 206 | 207 |
| APG08032.1 | 208 | 209 | 210 | 211 |
| APG05712.1 | 212 | 213 | 214 | 215 |
| APG01658.1 | 216 | 217 | 218 | 219 |
| APG06498.1 | 220 | 221 | 222 | 223 |
| APG09106.1 | 224 | 225 | 226 | 227 |
| APG09882.1 | 228 | 229 | 230 | 231 |
| APG02675.1 | 232 | 233 | 234 | 203 |
| APG01405.1 | 235 | 236 | 237 | 238 |
| APG06250.1 | 239 | 240 | 241 | 242 |
| APG06877.1 | 243 | 244 | 245 | 199 |
| APG09053.1 | 246 | 247 | 248 | 249 |
| APG04293.1 | 250 | 251 | 252 | 253 |
| APG01308.1 | 254 | 255 | 256 | 257 |
| APG06646.1 | 258 | 259 | 260 | 253 |
| APG09624 | 261 | 262 | 263 | ND |
| APG05405 | 264 | 265 | 266 | ND |
| APG06622 | 267 | 268 | 269 | 270 |
| APG02787 | 271 | 272 | 273 | 274 |
| APG06248 | 275 | 276 | 277 | 278 |
| APG06007 | 279 | 280 | 281 | 282 |
| APG02874 | 283 | 284 | 285 | 286 |
| APG03850 | 287 | 288 | 289 | 290 |
| APG07553 | 291 | 292 | 293 | 294 |
| APG03031 | 295 | 296 | 297 | 286 |
| APG09208 | 298 | 299 | 300 | 301 |
| APG05586 | 302 | 303 | 304 | 305 |
| APG08770 | 306 | 307 | 308 | 305 |
| APG08167 | 309 | 310 | 311 | 312 |
| APG01604 | 313 | 314 | 315 | 312 |
| APG03021 | 316 | 317 | 318 | 319 |
| APG06015 | 320 | 321 | 322 | 323 |
| APG09344 | 324 | 325 | 326 | 327 |
| APG07991 | 328 | 329 | 330 | 331 |
| APG01868 | 332 | 333 | 334 | 331 |
| APG02998 | 335 | 336 | 337 | 331 |
| APG09298 | 82 | 303 | 304 | 305 |
| APG06251 | 338 | 303 | 304 | 305 |
| APG03066 | 339 | 303 | 304 | 305 |
| APG01560 | 340 | 303 | 304 | 305 |
| APG02777 | 341 | 303 | 304 | 305 |
| APG05761 | 342 | 303 | 304 | 305 |
| APG02479 | 343 | 303 | 304 | 305 |
| APG08385 | 344 | 303 | 304 | 305 |
| APG09217 | 345 | 303 | 304 | 305 |
| APG06657 | 346 | 303 | 304 | 305 |
| APG05586 | 347 | 303 | 304 | 305 |
| APG07433.1 deletion | 106 | 153 | 154 | 152 |
| variant | | | | |
| APG08290.1 deletion | 107 | 158 | 159 | 160 |
| variant | | | | |

* ND: not determined

[0146] The term “guide RNA” refers to a nucleotide sequence having sufficient complementarity with a target nucleotide sequence to hybridize with the target sequence and direct sequence-specific binding of an associated RGN to the target nucleotide sequence. For CRISPR-Cas RGNs, the respective guide RNA is one or more RNA molecules (generally, one or two), that can bind to the RGN and guide the RGN to bind to a particular target nucleotide sequence, and in those instances wherein the RGN has nickase or nuclease activity, also cleave the target nucleotide sequence. A guide RNA comprises a CRISPR RNA (crRNA) and in some embodiments, a trans-activating CRISPR RNA (tracrRNA). In some embodiments, a portion of the guideRNA comprises DNA nucleotides. In certain embodiments, the guideRNA comprises artificial, non-naturally-occurring nucleotide analogs or one or more nucleotides are chemically modified.

[0147] A CRISPR RNA comprises a spacer sequence and a CRISPR repeat sequence. The “spacer sequence” is the nucleotide sequence that directly hybridizes with the target nucleotide sequence of interest. The spacer sequence is engineered to be fully or partially complementary with the target sequence of interest. In various embodiments, the spacer sequence comprises from about 8 nucleotides to about 30 nucleotides, or more. For example, the spacer sequence can be about 8, about 9, about 10, about 11, about 12, about 13, about 14, about 15, about 16, about 17, about 18, about 19, about 20, about 21, about 22, about 23, about 24, about 25, about 26, about 27, about 28, about 29, about 30, or more nucleotides in length. In some embodiments, the spacer sequence is 8, 9, 10, 11, 12, 13, 14, 15, 16, 17, 18, 19, 20, 21, 22, 23, 24, 25, 26, 27, 28, 29, 30, or more nucleotides in length. In some embodiments, the spacer sequence is about 10 to about 26 nucleotides in length, or about 12 to about 30 nucleotides in length. In particular embodiments, the spacer sequence is about 30 nucleotides in length. In some embodiments, the spacer sequence is 30 nucleotides in length. In some embodiments, the degree of complementarity between a spacer sequence and its corresponding target sequence, when optimally aligned using a suitable alignment algorithm, is between 50% and 99% or more, including but not limited to about or more than about 50%, about 60%, about 70%, about 75%, about 80%, about 81%, about 82%, about 83%, about 84%, about 85%, about 86%, about 87%, about 88%, about 89%, about 90%, about 91%, about 92%, about 93%, about 94%, about 95%, about 96%, about 97%, about 98%, about 99%, or more. In particular embodiments, the degree of complementarity between a spacer sequence and its corresponding target sequence, when optimally aligned using a suitable alignment algorithm, is 50%, 60%, 70%, 75%, 80%, 81%, 82%, 83%, 84%, 85%, 86%, 87%, 88%, 89%, 90%, 91%, 92%, 93%, 94%, 95%, 96%, 97%, 98%, 99%, or more. In particular embodiments, the spacer sequence is free of secondary structure, which can be predicted using any suitable polynucleotide folding algorithm known in the art, including but not limited to mFold (see, e.g., Zuker and Stiegler (1981) Nucleic Acids Res. 9:133-148) and RNAfold (see, e.g., Gruber et al. (2008) Cell 106(1):23-24).

[0148] The CRISPR RNA repeat sequence comprises a nucleotide sequence that forms a structure, either on its own or in concert with a hybridized tracrRNA, that is recognized by the RGN molecule. In various embodiments, the CRISPR RNA repeat sequence comprises from about 8 nucleotides to about 30 nucleotides, or more. In particular embodiments, the CRISPR RNA repeat sequence comprises from 8 nucleotides to 30 nucleotides, or more. For example, the CRISPR repeat sequence can be about 8, about 9, about 10, about 11, about 12, about 13, about 14, about 15, about 16, about 17, about 18, about 19, about 20, about 21, about 22, about 23, about 24, about 25, about 26, about 27, about 28, about 29, about 30, or more nucleotides in length. In particular embodiments, the CRISPR repeat sequence is 8, 9, 10, 11, 12, 13, 14, 15, 16, 17, 18, 19, 20, 21, 22, 23, 24, 25, 26, 27, 28, 29, 30, or more nucleotides in length. In some embodiments, the degree of complementarity between a CRISPR repeat sequence and its corresponding tracrRNA sequence, when optimally aligned using a suitable alignment algorithm, is between 50% and 99%, or more, including but not limited to about or more than about 50%, about 60%, about 70%, about 75%, about 80%, about 81%, about 82%, about 83%, about 84%, about 85%, about 86%, about 87%, about 88%, about 89%, about 90%, about 91%, about 92%, about 93%, about 94%, about 95%, about 96%, about 97%, about 98%, about 99%, or more. In particular embodiments, the degree of complementarity between a CRISPR repeat sequence and its corresponding tracrRNA sequence, when optimally aligned using a suitable alignment algorithm, is 50%, 60%, 70%, 75%, 80%, 81%, 82%, 83%, 84%, 85%, 86%, 87%, 88%, 89%, 90%, 91%, 92%, 93%, 94%, 95%, 96%, 97%, 98%, 99%, or more.

[0149] In some embodiments, the guide RNA further comprises a tracrRNA molecule. A trans-activating CRISPR RNA or tracrRNA molecule comprises a nucleotide sequence comprising a region that has sufficient complementarity to hybridize to a CRISPR repeat sequence of a crRNA, which is referred to herein as the anti-repeat region. In some embodiments, the tracrRNA molecule further comprises a region with secondary structure (e.g., stem-loop) or forms secondary structure upon hybridizing with its corresponding crRNA. In particular embodiments, the region of the tracrRNA that is fully or partially complementary to a CRISPR repeat sequence is at the 5′ end of the molecule and the 3′ end of the tracrRNA comprises secondary structure. This region of secondary structure generally comprises several hairpin structures, including the nexus hairpin, which is found adjacent to the anti-repeat sequence. There are often terminal hairpins at the 3′ end of the tracrRNA that can vary in structure and number, but often comprise a GC-rich Rho-independent transcriptional terminator hairpin followed by a string of Us at the 3′ end. See, for example, Briner et al. (2014) Molecular Cell 56:333-339, Briner and Barrangou (2016) Cold Spring Harb Protoc; doi: 10.1101/pdb.top090902, and U.S. Publication No. 2017/0275648, each of which is herein incorporated by reference in its entirety.

[0150] In various embodiments, the anti-repeat region of the tracrRNA that is fully or partially complementary to the CRISPR repeat sequence comprises from about 6 nucleotides to about 30 nucleotides, or more. For example, the region of base pairing between the tracrRNA anti-repeat sequence and the CRISPR repeat sequence can be about 6, about 7, about 8, about 9, about 10, about 11, about 12, about 13, about 14, about 15, about 16, about 17, about 18, about 19, about 20, about 21, about 22, about 23, about 24, about 25, about 26, about 27, about 28, about 29, about 30, or more nucleotides in length. In particular embodiments, the region of base pairing between the tracrRNA anti-repeat sequence and the CRISPR repeat sequence is 6, 7, 8, 9, 10, 11, 12, 13, 14, 15, 16, 17, 18, 19, 20, 21, 22, 23, 24, 25, 26, 27, 28, 29, 30, or more nucleotides in length. In particular embodiments, the anti-repeat region of the tracrRNA that is fully or partially complementary to a CRISPR repeat sequence is about 10 nucleotides in length. In particular embodiments, the anti-repeat region of the tracrRNA that is fully or partially complementary to a CRISPR repeat sequence is 10 nucleotides in length. In some embodiments, the degree of complementarity between a CRISPR repeat sequence and its corresponding tracrRNA anti-repeat sequence, when optimally aligned using a suitable alignment algorithm, is between 50% and 99% or more, including but not limited to about or more than about 50%, about 60%, about 70%, about 75%, about 80%, about 81%, about 82%, about 83%, about 84%, about 85%, about 86%, about 87%, about 88%, about 89%, about 90%, about 91%, about 92%, about 93%, about 94%, about 95%, about 96%, about 97%, about 98%, about 99%, or more. In particular embodiments, the degree of complementarity between a CRISPR repeat sequence and its corresponding tracrRNA anti-repeat sequence, when optimally aligned using a suitable alignment algorithm, is 50%, 60%, 70%, 75%, 80%, 81%, 82%, 83%, 84%, 85%, 86%, 87%, 88%, 89%, 90%, 91%, 92%, 93%, 94%, 95%, 96%, 97%, 98%, 99%, or more.

[0151] In various embodiments, the entire tracrRNA comprises from about 60 nucleotides to more than about 210 nucleotides. In particular embodiments, the entire tracrRNA comprises from 60 nucleotides to more than 210 nucleotides. For example, the tracrRNA can be about 60, about 65, about 70, about 75, about 80, about 85, about 90, about 95, about 100, about 105, about 110, about 115, about 120, about 125, about 130, about 135, about 140, about 150, about 160, about 170, about 180, about 190, about 200, about 210 or more nucleotides in length. In particular embodiments, the tracrRNA is 60, 65, 70, 75, 80, 85, 90, 95, 100, 105, 110, 115, 120, 125, 130, 135, 140, 150, 160, 170, 180, 190, 200, 210 or more nucleotides in length. In particular embodiments, the tracrRNA is about 100 to about 200 nucleotides in length, including about 95, about 96, about 97, about 98, about 99, about 100, about 105, about 106, about 107, about 108, about 109, and about 100 nucleotides in length. In particular embodiments, the tracrRNA is 100 to 110 nucleotides in length, including 95, 96, 97, 98, 99, 100, 105, 106, 107, 108, 109, and 110 nucleotides in length.

[0152] Guide RNAs form a complex with an RNA-guided, DNA-binding polypeptide or an RNA-guided nuclease to direct the RNA-guided nuclease to bind to a target sequence. If the guide RNA complexes with an RGN, the bound RGN introduces a single-stranded or double-stranded break at the target sequence. After the target sequence has been cleaved, the break can be repaired such that the DNA sequence of the target sequence is modified during the repair process. Provided herein are methods for using mutant variants of RNA-guided nucleases, which are either nuclease inactive or nickases, which are linked to deaminases to modify a target sequence in the DNA of host cells. The mutant variants of RNA-guided nucleases in which the nuclease activity is inactivated or significantly reduced may be referred to as RNA-guided, DNA-binding polypeptides, as the polypeptides are capable of binding to, but not necessarily cleaving, a target sequence. RNA-guided nucleases only capable of cleaving a single strand of a double-stranded nucleic acid molecule are referred to herein as nickases.

[0153] A target nucleotide sequence is bound by an RNA-guided, DNA-binding polypeptide and hybridizes with the guide RNA associated with the RGDBP. The target sequence can then be subsequently cleaved if the RGDBP possesses nuclease activity (i.e., is an RGN), which encompasses activity as a nickase.

[0154] The guide RNA can be a single guide RNA or a dual-guide RNA system. A single guide RNA comprises the crRNA and optionally tracrRNA on a single molecule of RNA, whereas a dual-guide RNA system comprises a crRNA and a tracrRNA present on two distinct RNA molecules, hybridized to one another through at least a portion of the CRISPR repeat sequence of the crRNA and at least a portion of the tracrRNA, which may be fully or partially complementary to the CRISPR repeat sequence of the crRNA. In some of those embodiments wherein the guide RNA is a single guide RNA, the crRNA and optionally tracrRNA are separated by a linker nucleotide sequence.

[0155] In general, the linker nucleotide sequence is one that does not include complementary bases in order to avoid the formation of secondary structure within or comprising nucleotides of the linker nucleotide sequence. In some embodiments, the linker nucleotide sequence between the crRNA and tracrRNA is at least 3, at least 4, at least 5, at least 6, at least 7, at least 8, at least 9, at least 10, at least 11, at least 12, or more nucleotides in length. In particular embodiments, the linker nucleotide sequence between the crRNA and tracrRNA is 3, 4, 5, 6, 7, 8, 9, 10, 11, 12, or more nucleotides in length. In particular embodiments, the linker nucleotide sequence of a single guide RNA is at least 4 nucleotides in length. In particular embodiments, the linker nucleotide sequence of a single guide RNA is 4 nucleotides in length.

[0156] In certain embodiments, the guide RNA can be introduced into a target cell, organelle, or embryo as an RNA molecule. The guide RNA can be transcribed in vitro or chemically synthesized. In some embodiments, a nucleotide sequence encoding the guide RNA is introduced into the cell, organelle, or embryo. In some embodiments, the nucleotide sequence encoding the guide RNA is operably linked to a promoter (e.g., an RNA polymerase III promoter). The promoter can be a native promoter or heterologous to the guide RNA-encoding nucleotide sequence. In some embodiments, the promoter is selected from any one of the promoters disclosed in U.S. Provisional Appl. No. 63/209,660, filed Jun. 11, 2021, which is herein incorporated by reference in its entirety, including SEQ ID NOs: 348-357 or an active variant or fragment thereof, including a promoter having at least 60%, at least 70%, at least 80%, at least 85%, at least 90%, at least 95%, at least 96%, at least 97%, at least 98%, at least 99% or greater sequence identity to any one of SEQ ID NOs: 348-357.

[0157] In various embodiments, the guide RNA can be introduced into a target cell, organelle, or embryo as a ribonucleoprotein complex, as described herein, wherein the guide RNA is bound to an RNA-guided nuclease polypeptide.

[0158] The guide RNA directs an associated RNA-guided nuclease to a particular target nucleotide sequence of interest through hybridization of the guide RNA to the target nucleotide sequence. A target nucleotide sequence can comprise DNA, RNA, or a combination of both and can be single-stranded or double-stranded. A target nucleotide sequence can be genomic DNA (i.e., chromosomal DNA), plasmid DNA, or an RNA molecule (e.g., messenger RNA, ribosomal RNA, transfer RNA, micro RNA, small interfering RNA). The target nucleotide sequence can be bound (and in some embodiments, cleaved) by an RNA-guided, DNA-binding polypeptide in vitro or in a cell. The chromosomal sequence targeted by the RGDBP can be a nuclear, plastid or mitochondrial chromosomal sequence. In some embodiments, the target nucleotide sequence is unique in the target genome.

[0159] In some embodiments, the target nucleotide sequence is adjacent to a protospacer adjacent motif (PAM). A PAM is generally within about 1 to about 10 nucleotides from the target nucleotide sequence, including about 1, about 2, about 3, about 4, about 5, about 6, about 7, about 8, about 9, or about 10 nucleotides from the target nucleotide sequence. In particular embodiments, a PAM is within 1 to 10 nucleotides from the target nucleotide sequence, including 1, 2, 3, 4, 5, 6, 7, 8, 9, or 10 nucleotides from the target nucleotide sequence. Unless otherwise stated, the PAM is generally immediately adjacent to the target nucleotide sequence, either at its 5′ or 3′ end. In some embodiments, the PAM is 3′ of the target sequence. Generally, the PAM is a consensus sequence of about 2-6 nucleotides, but in particular embodiments, is 1, 2, 3, 4, 5, 6, 7, 8, 9, or more nucleotides in length.

[0160] The PAM restricts which sequences a given RGDBP or RGN can target, as its PAM needs to be proximal to the target nucleotide sequence. Upon recognizing its corresponding PAM sequence, the RGN can cleave the target nucleotide sequence at a specific cleavage site. As used herein, a cleavage site is made up of the two particular nucleotides within a target nucleotide sequence between which the nucleotide sequence is cleaved by an RGN. The cleavage site can comprise the 1st and 2^{nd}, 2^{nd} and 3^{rd}, 3rd and 4^{th}, 4^{th} and 5^{th}, 5^{th} and 6th 7^{th} and 8^{th}, or 8^{th} and 9^{th} nucleotides from the PAM in either the 5′ or 3′ direction. As RGNs can cleave a target nucleotide sequence resulting in staggered ends, in some embodiments, the cleavage site is defined based on the distance of the two nucleotides from the PAM on the positive (+) strand of the polynucleotide and the distance of the two nucleotides from the PAM on the negative (−) strand of the polynucleotide.

[0161] RGDBPs and RGNs can be used to deliver a fused polypeptide, polynucleotide, or small molecule payload to a particular genomic location.

[0162] In those embodiments wherein the DNA-binding polypeptide comprises a meganuclease, a target sequence can comprise a pair of inverted, 9 basepair “half sites” which are separated by four basepairs. In the case of a single-chain meganuclease, the N-terminal domain of the protein contacts a first half-site and the C-terminal domain of the protein contacts a second half-site. Cleavage by a meganuclease produces four basepair 3′ overhangs. In those embodiments wherein the DNA-binding polypeptide comprises a compact TALEN, the recognition sequence comprises a first CNNNGN sequence that is recognized by the I-TevI domain, followed by a non-specific spacer 4-16 basepairs in length, followed by a second sequence 16-22 bp in length that is recognized by the TAL-effector domain (this sequence typically has a 5′ T base). In those embodiments wherein the DNA-binding polypeptide comprises a zinc finger, the DNA binding domains typically recognize an 18-bp recognition sequence comprising a pair of nine basepair “half-sites” separated by 2-10 basepairs and cleavage by the nuclease creates a blunt end or a 5′ overhang of variable length (frequently four basepairs).

### IV. Fusion Proteins

[0163] In some embodiments, a DNA-binding polypeptide (e.g., nuclease-inactive or a nickase RGN) is operably linked to a deaminase of the invention. In some embodiments, a DNA-binding polypeptide (e.g., nuclease inactive RGN or nickase RGN) fused to a deaminase of the invention can be targeted to a particular location of a nucleic acid molecule (i.e., target nucleic acid molecule), which in some embodiments is a particular genomic locus, to alter the expression of a desired sequence. In some embodiments, the binding of a fusion protein to a target sequence results in deamination of a nucleobase, resulting in conversion from one nucleobase to another. In some embodiments, the binding of this fusion protein to a target sequence results in deamination of a nucleobase adjacent to the target sequence. The nucleobase adjacent to the target sequence that is deaminated and mutated using the presently disclosed compositions and methods may be 1, 2, 3, 4, 5, 6, 7, 8, 9, 10, 11, 12, 13, 14, 15, 16, 17, 18, 19, 20, 25, 30, 35, 40, 45, 50, 55, 60, 65, 70, 75, 80, 85, 90, 95, or 100 base pairs from the 5′ or 3′ end of the target sequence (bound by the gRNA) within the target nucleic acid molecule. Some aspects of this disclosure provide fusion proteins comprising (i) a DNA-binding polypeptide (e.g., a nuclease-inactive or nickase RGN polypeptide); (ii) a deaminase polypeptide; and optionally (iii) a second deaminase. The second deaminase may be the same deaminase as the first or may be a different deaminase. In some embodiments, both the first and the second deaminase are cytosine deaminases of the invention.

[0164] The instant disclosure provides fusion proteins of various configurations. In some embodiments, the deaminase polypeptide is fused to the N-terminus of the DNA-binding polypeptide (e.g., RGN polypeptide). In some embodiments, the deaminase polypeptide is fused to the C-terminus of the DNA-binding polypeptide (e.g., RGN polypeptide).

[0165] In some embodiments, the deaminase and DNA-binding polypeptide (e.g., RNA-guided, DNA-binding polypeptide) are fused to each other via a peptide linker. The linker between the deaminase and DNA-binding polypeptide (e.g., RNA-guided, DNA-binding polypeptide) can determine the editing window of the fusion protein, thereby increasing deaminase specificity and reducing off-target mutations. Various linker lengths and flexibilities can be employed, ranging from very flexible linkers of the form (GGGGS)ₙ and (G)ₙ to more rigid linkers of the form (EAAAK)ₙ and (XP)ₙ, to achieve the optimal length and rigidity for deaminase activity for the specific applications. The term “linker,” as used herein, refers to a chemical group or a molecule linking two molecules or moieties, e.g., a binding domain and a cleavage domain of a nuclease. In some embodiments, a linker joins an RNA guided nuclease and a deaminase. In some embodiments, a linker joins a dead or inactive RGN and a deaminase. In further embodiments, a linker joins two deaminases. In some embodiments, a linker joins an RNA guided nuclease and a USP. In some embodiments, a linker joins a deaminase and a USP. In certain embodiments, a linker joins an RNA guided nuclease-deaminase fusion with a USP. Typically, the linker is positioned between, or flanked by, two groups, molecules, or other moieties and connected to each one via a covalent bond, thus connecting the two. In some embodiments, the linker is an amino acid or a plurality of amino acids (e.g., a peptide or protein). In some embodiments, the linker is an organic molecule, group, polymer, or chemical moiety. In some embodiments, the linker is 3-100 amino acids in length, for example, 3, 4, 5, 6, 7, 8, 9, 10, 11, 12, 13, 14, 15, 16, 17, 18, 19, 20, 21, 22, 23, 24, 25, 26, 27, 28, 29, 30, 30-35, 35-40, 40-45, 45-50, 50-60, 60-70, 70-80, 80-90, 90-100, 100-150, or 150-200 amino acids in length. Longer or shorter linkers are also contemplated. In some embodiments, a shorter linker is preferred to decrease the overall size or length of the fusion protein or its coding sequence.

[0166] In some embodiments, the linker comprises a (GGGGS)ₙ, a (G)ₙ an (EAAAK)ₙ, or an (XP)ₙ motif, or a combination of any of these, wherein n is independently an integer between 1 and 30. In some embodiments, n is independently 1, 2, 3, 4, 5, 6, 7, 8, 9, 10, 11, 12, 13, 14, 15, 16, 17, 18, 19, 20, 21, 22, 23, 24, 25, 26, 27, 28, 29, or 30, or, if more than one linker or more than one linker motif is present, any combination thereof. Additional suitable linker motifs and linker configurations will be apparent to those of skill in the art. In some embodiments, suitable linker motifs and configurations include those described in Chen et al., 2013 (Adv Drug Deliv Rev. 65(10):1357-69, the entire contents of which are incorporated herein by reference). Additional suitable linker sequences will be apparent to those of skill in the art. In some embodiments, the linker sequence comprises the amino acid sequence set forth as SEQ ID NO: 78 or 79.

[0167] In some instances, cellular uracil DNA glycosylase (UDG) recognizes the U:G heteroduplex DNA resulting from the deamination of cytosine and can catalyze the removal of uracil from the DNA to leave an abasic site, thereby initiating base-excision repair with a reversion of the U:G pair to a C:G pair as the most common outcome, although C>G or C>A mutations have also been known to occur, as well as indel (insertion or deletion) formation. In order to prevent or reduce base excision repair by uracil DNA glycosylase that reverts the uracil generated by a cytosine base editor back to a cytosine, in some embodiments, the cytosine base editor fusion protein further comprises a uracil stabilizing polypeptide (USP), such as a uracil DNA glycosylase inhibitor (UGI) or USP2.

[0168] As used herein, the terms “uracil stabilizing protein,” “uracil stabilizing polypeptide,” and “USPs” refer to a polypeptide having uracil stabilizing activity. As used herein, the term “uracil stabilizing activity” refers to the ability of a molecule (e.g., a polypeptide) to increase the mutation rate of at least one cytidine, deoxycytidine, or cytosine to a thymidine, deoxythymidine, or thymine in a nucleic acid molecule by a cytosine deaminase compared to the mutation rate by the cytosine deaminase in the absence of the molecule (e.g., uracil stabilizing polypeptide). Without being bound by a theory or mechanism of action, it is believed that USPs may function by maintaining the presence of uracil in single-stranded DNA that has been generated through the deamination of a cytidine, deoxycytidine, or cytosine base for a sufficient period of time to allow for replication to occur and introduce the desired C>T mutation. Uracil stabilizing activity may occur through inhibition of uracil DNA glycosylase, the base excision repair pathway, or mis-match repair mechanisms.

[0169] Non-limiting examples of USPs that can be fused to the presently disclosed cytosine deaminases and fusion proteins comprising the presently disclosed cytosine deaminases and a DNA-binding polypeptide include a uracil DNA glycosylase inhibitor (UGI), an example of which is set forth as SEQ ID NO: 86 and any one of the USPs disclosed in PCT Publication No. WO 2021/217002 (which is herein incorporated by reference in its entirety), including USP2 which is set forth herein as SEQ ID NO: 81.

[0170] In some embodiments, the deaminase-DBD fusion protein comprises a USP that is a wild-type USP or an active fragment or a variant thereof. For example, in some embodiments, the deaminase-DBD fusion protein comprises a USP comprising SEQ ID NO: 81 or 86 or an active fragment or variant thereof. In some embodiments, a USP fragment comprises an amino acid sequence that comprises at least 60%, at least 65%, at least 70%, at least 75%, at least 80%, at least 85%, at least 90%, at least 95%, at least 96%, at least 97%, at least 98%, at least 99%, or at least 99.5% of the amino acid sequence as set forth in SEQ ID NO: 81 or 86. In some embodiments, the deaminase-DBD fusion protein comprises a USP having at least 70%, at least 75%, at least 80%, at least 85%, at least 90%, at least 95%, at least 96%, at least 97%, at least 98%, at least 99% or more sequence identity to the USP set forth as SEQ ID NO: 81 or 86.

[0171] Additional suitable USP sequences are known to those in the art, and include, for example, those published in Wang et al., 1989. J. Biol. Chem. 264: 1163-1171; Lundquist et al., 1997. J. Biol. Chem. 272:21408-21419; Ravishankar et al., 1998. Nucleic Acids Res. 26:4880-4887; and Putnam et al., 1999. J. Mol. Biol. 287:331-346(1999), the entire contents of each are incorporated herein by reference.

[0172] In some embodiments, a linker joins a deaminase-DBD fusion protein with a USP. In some embodiments, a linker joins a deaminase and a USP. In some embodiments, the linker joining a USP to a deaminase or a deaminase-DBD fusion protein is an amino acid or a plurality of amino acids (e.g., a peptide or protein). In some embodiments, the linker is an organic molecule, group, polymer, or chemical moiety. In some embodiments, the linker is 3-100 amino acids in length, for example, 3, 4, 5, 6, 7, 8, 9, 10, 11, 12, 13, 14, 15, 16, 17, 18, 19, 20, 21, 22, 23, 24, 25, 26, 27, 28, 29, 30, 30-35, 35-40, 40-45, 45-50, 50-60, 60-70, 70-80, 80-90, 90-100, 100-150, or 150-200 amino acids in length. Longer or shorter linkers are also contemplated. In some embodiments, a shorter linker is preferred to decrease the overall size or length of the fusion protein or its coding sequence. In particular embodiments, the linker joining a USP to a deaminase or a deaminase-DBD fusion protein has the sequence set forth as SEQ ID NO: 120.

[0173] In some embodiments, the general architecture of exemplary fusion proteins provided herein comprises the structure: [NH₂]-[deaminase]-[DBP]-[COOH]; [NH₂]-[DBP]-[deaminase]-[COOH]; [NH₂]-[DBP]-[deaminase]-[deaminase]-[COOH]; [NH₂]-[deaminase]-[DBP]-[deaminase]-[COOH]; [NH₂]-[deaminase]-[deaminase]-[DBP]-[COOH]; [NH₂]-[deaminase]-[DBP]-[USP]-[COOH]; [NH₂]-[DBP]-[deaminase]-[USP]-[COOH]; [NH₂]-[USP]-[deaminase]-[DBP]-[COOH]; [NH₂]-[USP]-[DBP]-[deaminase]-[COOH]; [NH₂]-[deaminase]-[USP]-[DBP]-[COOH]; or [NH₂]-[DBP]-[USP]-[deaminase]-[COOH], wherein DBP is a DNA-binding polypeptide, USP is a uracil stabilizing polypeptide, NH₂ is the N-terminus of the fusion protein and COOH is the C-terminus of the fusion protein. In some embodiments, the fusion protein comprises more than two deaminase polypeptides.

[0174] In certain embodiments, the general architecture of exemplary fusion proteins provided herein comprises the structure: [NH₂]-[deaminase]-[RGN]-[COOH]; [NH₂]-[RGN]-[deaminase]-[COOH]; [NH₂]-[RGN]-[deaminase]-[deaminase]-[COOH]; [NH₂]-[deaminase]-[RGN]-[deaminase]-[COOH]; or [NH₂]-[deaminase]-[deaminase]-[RGN]-[COOH]; [NH₂]-[deaminase]-[RGN]-[USP]-[COOH]; [NH₂]-[RGN]-[deaminase]-[USP]-[COOH]; [NH₂]-[USP]-[deaminase]-[RGN]-[COOH]; [NH₂]-[USP]-[RGN]-[deaminase]-[COOH]; [NH₂]-[deaminase]-[USP]-[RGN]-[COOH]; or [NH₂]-[RGN]-[USP]-[deaminase]-[COOH], wherein RGN is an RNA-guided nuclease, USP is a uracil stabilizing polypeptide, NH₂ is the N-terminus of the fusion protein and COOH is the C-terminus of the fusion protein. In some embodiments, the fusion protein comprises more than two deaminase polypeptides.

[0175] In some embodiments, the fusion protein comprises the structure: [NH₂]-[deaminase]-[nuclease-inactive RGN]-[COOH]; [NH₂]-[deaminase]-[deaminase]-[nuclease-inactive RGN]-[COOH]; [NH₂]-[nuclease-inactive RGN]-[deaminase]-[COOH]; [NH₂]-[deaminase]-[nuclease-inactive RGN]-[deaminase]-[COOH]; [NH₂]-[nuclease-inactive RGN]-[deaminase]-[deaminase]-[COOH]; [NH₂]-[deaminase]-[nuclease-inactive RGN]-[USP]-[COOH]; [NH₂]-[nuclease-inactive RGN]-[deaminase]-[USP]-[COOH]; [NH₂]-[USP]-[deaminase]-[nuclease-inactive RGN]-[COOH]; [NH₂]-[USP]-[nuclease-inactive RGN]-[deaminase]-[COOH]; [NH₂]-[deaminase]-[USP]-[nuclease-inactive RGN]-[COOH]; or [NH₂]-[nuclease-inactive RGN]-[USP]-[deaminase]-[COOH]. It should be understood that “nuclease-inactive RGN” represents any RGN, including any CRISPR-Cas protein, which has been mutated to be nuclease-inactive. In some embodiments, the fusion protein comprises more than two deaminase polypeptides.

[0176] In some embodiments, the fusion protein comprises the structure: [NH₂]-[deaminase]-[RGN nickase]-[COOH]; [NH₂]-[deaminase]-[deaminase]-[RGN nickase]-[COOH]; [NH₂]-[RGN nickase]-[deaminase]-[COOH]; [NH₂]-[deaminase]-[RGN nickase]-[deaminase]-[COOH]; or [NH₂]-[RGN nickase]-[deaminase]-[deaminase]-[COOH]; [NH₂]-[deaminase]-[RGN nickase]-[USP]-[COOH]; [NH₂]-[RGN nickase]-[deaminase]-[USP]-[COOH]; [NH₂]-[USP]-[deaminase]-[RGN nickase]-[COOH]; [NH₂]-[USP]-[RGN nickase]-[deaminase]-[COOH]; [NH₂]-[deaminase]-[USP]-[RGN nickase]-[COOH]; or [NH₂]-[RGN nickase]-[USP]-[deaminase]-[COOH]. It should be understood that “RGN nickase” represents any RGN, including any CRISPR-Cas protein, which has been mutated to be active as a nickase.

[0177] In some embodiments, the “-” used in the general architecture above indicates the presence of an optional linker sequence. In some embodiments, the fusion proteins provided herein do not comprise a linker sequence. In some embodiments, at least one of the optional linker sequences are present.

[0178] Other exemplary features that may be present are localization sequences, such as nuclear localization sequences, cytoplasmic localization sequences, export sequences, such as nuclear export sequences, or other localization sequences, as well as sequence tags that are useful for solubilization, purification or detection of the fusion proteins. Suitable localization signal sequences and sequences of protein tags that are provided herein, and include, but are not limited to, biotin carboxylase carrier protein (BCCP) tags, myc-tags, calmodulin-tags, FLAG-tags (e.g., 3×FLAG-tag), hemagglutinin (HA)-tags, polyhistidine tags, also referred to as histidine tags or His-tags, maltose binding protein (MBP)-tags, nus-tags, glutathione-S-transferase (GST)-tags, green fluorescent protein (GFP)-tags, thioredoxin-tags, S-tags, Softags (e.g., Softag 1, Softag 3), streptags, biotin ligase tags, FlAsH tags, V5 tags, and SBP-tags.

[0179] Additional suitable sequences will be apparent to those of skill in the art.

[0180] In certain embodiments, the presently disclosed fusion proteins comprise at least one cell-penetrating domain that facilitates cellular uptake of the fusion protein. Cell-penetrating domains are known in the art and generally comprise stretches of positively charged amino acid residues (i.e., polycationic cell-penetrating domains), alternating polar amino acid residues and non-polar amino acid residues (i.e., amphipathic cell-penetrating domains), or hydrophobic amino acid residues (i.e., hydrophobic cell-penetrating domains) (see, e.g., Milletti F. (2012) Drug Discov Today 17:850-860). A non-limiting example of a cell-penetrating domain is the trans-activating transcriptional activator (TAT) from the human immunodeficiency virus 1.

[0181] In some embodiments, deaminases or fusion proteins provided herein further comprise a nuclear localization sequence (NLS). The nuclear localization signal, plastid localization signal, mitochondrial localization signal, dual-targeting localization signal, and/or cell-penetrating domain can be located at the amino-terminus (N-terminus), the carboxyl-terminus (C-terminus), or in an internal location of the fusion protein.

[0182] In some embodiments, the NLS is fused to the N-terminus of the fusion protein or deaminase. In some embodiments, the NLS is fused to the C-terminus of the fusion protein or deaminase. In some embodiments, the NLS is fused to the N-terminus of the deaminase of the fusion protein. In some embodiments, the NLS is fused to the C-terminus of the deaminase of the fusion protein. In some embodiments, the NLS is fused to the N-terminus of the DNA-binding polypeptide (e.g., RGN polypeptide) of the fusion protein. In some embodiments, the NLS is fused to the C-terminus of the DNA-binding polypeptide (e.g., RGN polypeptide) of the fusion protein. In some embodiments, the NLS is fused to the N-terminus of the deaminase polypeptide of the fusion protein. In some embodiments, the NLS is fused to the C-terminus of the deaminase polypeptide of the fusion protein. In some embodiments, the NLS is fused to the fusion protein via one or more linkers, including but not limited to SEQ ID NO: 148. In some embodiments, the NLS is fused to the fusion protein without a linker. In some embodiments, the NLS comprises an amino acid sequence of any one of the NLS sequences provided or referenced herein. In some embodiments, the NLS comprises an amino acid sequence as set forth in SEQ ID NO: 76 or SEQ ID NO: 80. In some embodiments, the fusion protein or deaminase comprises SEQ ID NO: 76 on its N-terminus and SEQ ID NO: 80 on its C-terminus.

[0183] In some embodiments, fusion proteins as provided herein comprise the full-length sequence of a deaminase, e.g., any one of SEQ ID NO: 2, 4, and 6-12. In some embodiments, however, fusion proteins as provided herein do not comprise a full-length sequence of a deaminase, but only a fragment thereof. For example, in some embodiments, a fusion protein provided herein further comprises a DNA-binding polypeptide (e.g., an RNA-guided, DNA-binding) domain and a deaminase domain.

[0184] In some embodiments, a fusion protein of the invention comprises a DNA-binding polypeptide (e.g., an RGN) and a deaminase, wherein the deaminase has an amino acid sequence having at least 50%, at least 55%, at least 60%, at least 65%, at least 70%, at least 75%, at least 80%, at least 85%, at least 90%, at least 95%, at least 96%, at least 97%, at least 98%, at least 99%, or 100% identity to any of SEQ ID NOs: 2, 4, and 6-12. Examples of such fusion proteins are described in the Examples section herein.

[0185] In some embodiments, the fusion protein comprises one deaminase polypeptide. In some embodiments, the fusion protein comprises at least two deaminase polypeptides, operably linked either directly or via a peptide linker. In some embodiments, the fusion protein comprises one deaminase polypeptide, and a second deaminase polypeptide is co-expressed with the fusion protein.

[0186] Also provided herein is a ribonucleoprotein complex comprising a fusion protein comprising a deaminase and an RGDBP and the guide RNA, either as a single guide or as a dual guide RNA (also collectively referred to as gRNA).

V. Nucleotides Encoding Deaminases, Fusion Proteins, and or gRNA

[0187] The present disclosure provides polynucleotides (SEQ ID NOs: 109, 111, and 113-119) encoding the presently disclosed deaminase polypeptides. The present disclosure further provides polynucleotides encoding for fusion proteins which comprise a deaminase and DNA-binding polypeptide, for example a meganuclease, a zinc finger fusion protein, or a TALEN. The present disclosure further provides polynucleotides encoding for fusion proteins which comprise a deaminase and an RNA-guided, DNA-binding polypeptide. Such RNA-guided, DNA-binding polypeptides may be an RGN or RGN variant. The protein variant may be nuclease-inactive or a nickase. The RGN may be a CRISPR-Cas protein or active variant or fragment thereof. SEQ ID NOs: 74 and 75 are non-limiting examples of an RGN and a nickase RGN variant, respectively. Examples of CRISPR-Cas nucleases are well-known in the art, and similar corresponding mutations can create mutant variants which are also nickases or are nuclease inactive.

[0188] An embodiment of the invention provides a polynucleotide encoding a fusion protein which comprises an RGDBP and a deaminase described herein (SEQ ID NO: 2, 4, and 6-12, or a variant thereof). In some embodiments, a second polynucleotide encodes the guide RNA required by the RGDBP for targeting to the nucleotide sequence of interest. In some embodiments, the guide RNA and the fusion protein are encoded by the same polynucleotide.

[0189] The use of the term “polynucleotide” is not intended to limit the present disclosure to polynucleotides comprising DNA, though such DNA polynucleotides are contemplated. Those of ordinary skill in the art will recognize that polynucleotides can comprise ribonucleotides (RNA) (e.g., mRNA) and combinations of ribonucleotides and deoxyribonucleotides. Such deoxyribonucleotides and ribonucleotides include both naturally occurring molecules and synthetic analogues. The polynucleotides disclosed herein also encompass all forms of sequences including, but not limited to, single-stranded forms, double-stranded forms, stem-and-loop structures, circular forms (e.g., including circular RNA), and the like.

[0190] An embodiment of the invention is a nucleic acid molecule comprising a sequence having at least 50%, at least 55%, at least 60%, at least 65%, at least 70%, at least 75%, at least 80%, at least 85%, at least 90%, at least 95%, at least 96%, at least 97%, at least 98%, at least 99% or 100% identity to any of SEQ ID NOs: 109, 111, and 113-119, wherein the nucleic acid molecule encodes a deaminase having cytosine deaminase activity. The nucleic acid molecule may further comprise a heterologous promoter or terminator. The nucleic acid molecule may encode a fusion protein, where the encoded deaminase is operably linked to a DNA-binding polypeptide, optionally a second deaminase, and optionally a USP. In some embodiments, the nucleic acid molecule encodes a fusion protein, where the encoded deaminase is operably linked to an RGN, optionally a second deaminase, and optionally a USP.

[0191] In some embodiments, nucleic acid molecules comprising a polynucleotide which encodes a deaminase of the invention are codon optimized for expression in an organism of interest. A “codon-optimized” coding sequence is a polynucleotide coding sequence having its frequency of codon usage designed to mimic the frequency of preferred codon usage or transcription conditions of a particular host cell. Expression in the particular host cell or organism is enhanced as a result of the alteration of one or more codons at the nucleic acid level such that the translated amino acid sequence is not changed. Nucleic acid molecules can be codon optimized, either wholly or in part. Codon tables and other references providing preference information for a wide range of organisms are available in the art (see, e.g., Campbell and Gowri (1990) Plant Physiol. 92:1-11 for a discussion of plant-preferred codon usage). Methods are available in the art for synthesizing plant-preferred genes. See, for example, U.S. Pat. Nos. 5,380,831, and 5,436,391, and Murray et al. (1989) Nucleic Acids Res. 17:477-498, herein incorporated by reference.

[0192] In some embodiments, polynucleotides encoding the deaminases, fusion proteins, and/or gRNAs described herein are provided in expression cassettes for in vitro expression or expression in a cell, organelle, embryo, or organism of interest. The cassette may include 5′ and 3′ regulatory sequences operably linked to a polynucleotide encoding a deaminase and/or a fusion protein comprising a deaminase, an RNA-guided DNA-binding polypeptide and optionally a second deaminase, and/or gRNA provided herein that allows for expression of the polynucleotide. The cassette may additionally contain at least one additional gene or genetic element to be cotransformed into the organism. Where additional genes or elements are included, the components are operably linked. The term “operably linked” is intended to mean a functional linkage between two or more elements. For example, an operable linkage between a promoter and a coding region of interest (e.g., a region coding for a deaminase, RNA-guided DNA-binding polypeptide, and/or gRNA) is a functional link that allows for expression of the coding region of interest. Operably linked elements may be contiguous or non-contiguous. When used to refer to the joining of two protein coding regions, by operably linked is intended that the coding regions are in the same reading frame. In some embodiments, the additional gene(s) or element(s) are provided on multiple expression cassettes. For example, the nucleotide sequence encoding a presently disclosed deaminase, either alone or as a component of a fusion protein, can be present on one expression cassette, whereas the nucleotide sequence encoding a gRNA can be on a separate expression cassette. Another example may have the nucleotide sequence encoding a presently disclosed deaminase alone on a first expression cassette, a second expression cassette encoding a fusion protein comprising a deaminase, and a nucleotide sequence encoding a gRNA on a third expression cassette. Such an expression cassette is provided with a plurality of restriction sites and/or recombination sites for insertion of the polynucleotides to be under the transcriptional regulation of the regulatory regions. Expression cassettes which comprise a selectable marker gene may also be present.

[0193] The expression cassette may include in the 5-3′ direction of transcription, a transcriptional (and, in some embodiments, translational) initiation region (i.e., a promoter), a deaminase-encoding polynucleotide of the invention, and a transcriptional (and in some embodiments, translational) termination region (i.e., termination region) functional in the organism of interest. The promoters of the invention are capable of directing or driving expression of a coding sequence in a host cell. The regulatory regions (e.g., promoters, transcriptional regulatory regions, and translational termination regions) may be endogenous or heterologous to the host cell or to each other. As used herein, “heterologous” in reference to a sequence is a sequence that originates from a foreign species, or, if from the same species, is substantially modified from its native form in composition and/or genomic locus by deliberate human intervention. As used herein, a chimeric gene comprises a coding sequence operably linked to a transcription initiation region that is heterologous to the coding sequence.

[0194] Convenient termination regions are available from the Ti-plasmid of A. tumefaciens, such as the octopine synthase and nopaline synthase termination regions. See also Guerineau et al. (1991) Mol. Gen. Genet. 262:141-144; Proudfoot (1991) Cell 64:671-674; Sanfacon et al. (1991) Genes Dev. 5:141-149; Mogen et al. (1990) Plant Cell 2:1261-1272; Munroe et al. (1990) Gene 91:151-158; Ballas et al. (1989) Nucleic Acids Res. 17:7891-7903; and Joshi et al. (1987) Nucleic Acids Res. 15:9627-9639.

[0195] Additional regulatory signals include, but are not limited to, transcriptional initiation start sites, operators, activators, enhancers, other regulatory elements, ribosomal binding sites, an initiation codon, termination signals, and the like. See, for example, U.S. Pat. Nos. 5,039,523 and 4,853,331; EPO 0480762A2; Sambrook et al. (1992) Molecular Cloning: A Laboratory Manual, ed. Maniatis et al. (Cold Spring Harbor Laboratory Press, Cold Spring Harbor, N.Y.), hereinafter “Sambrook 11”; Davis et al., eds. (1980) Advanced Bacterial Genetics (Cold Spring Harbor Laboratory Press), Cold Spring Harbor, N.Y., and the references cited therein.

[0196] In preparing the expression cassette, the various DNA fragments may be manipulated, so as to provide for the DNA sequences in the proper orientation and, as appropriate, in the proper reading frame. Toward this end, adapters or linkers may be employed to join the DNA fragments or other manipulations may be involved to provide for convenient restriction sites, removal of superfluous DNA, removal of restriction sites, or the like. For this purpose, in vitro mutagenesis, primer repair, restriction, annealing, resubstitutions, e.g., transitions and transversions, may be involved.

[0197] A number of promoters can be used in the practice of the invention. The promoters can be selected based on the desired outcome. The nucleic acids can be combined with constitutive, inducible, growth stage-specific, cell type-specific, tissue-preferred, tissue-specific, or other promoters for expression in the organism of interest. See, for example, promoters set forth in WO 99/43838 and in U.S. Pat. Nos. 8,575,425; 7,790,846; 8,147,856; 8,58,6832; 7,772,369; 7,534,939; 6,072,050; 5,659,026; 5,608,149; 5,608,144; 5,604,121; 5,569,597; 5,466,785; 5,399,680; 5,268,463; 5,608,142; and 6,177,611; herein incorporated by reference.

[0198] For expression in plants, constitutive promoters also include CaMV 35S promoter (Odell et al. (1985) Nature 313:810-812); rice actin (McElroy et al. (1990) Plant Cell 2:163-171); ubiquitin (Christensen et al. (1989) Plant Mol. Biol. 12:619-632 and Christensen et al. (1992) Plant Mol. Biol. 18:675-689); pEMU (Last et al. (1991) Theor. Appl. Genet. 81:581-588); and MAS (Velten et al. (1984) EMBO J. 3:2723-2730).

[0199] Examples of inducible promoters are the Adh1 promoter which is inducible by hypoxia or cold stress, the Hsp70 promoter which is inducible by heat stress, the PPDK promoter and the pepcarboxylase promoter which are both inducible by light. Also useful are promoters which are chemically inducible, such as the In2-2 promoter which is safener induced (U.S. Pat. No. 5,364,780), the AxigI promoter which is auxin induced and tapetum specific but also active in callus (PCT US01/22169), the steroid-responsive promoters (see, for example, the ERE promoter which is estrogen induced, and the glucocorticoid-inducible promoter in Schena et al. (1991) Proc. Natl. Acad. Sci. USA 88:10421-10425 and McNellis et al. (1998) Plant J. 14(2):247-257) and tetracycline-inducible and tetracycline-repressible promoters (see, for example, Gatz et al. (1991) Mol. Gen. Genet. 227:229-237, and U.S. Pat. Nos. 5,814,618 and 5,789,156), herein incorporated by reference.

[0200] In some embodiments, tissue-specific or tissue-preferred promoters are utilized to target expression of an expression construct within a particular tissue. In certain embodiments, the tissue-specific or tissue-preferred promoters are active in plant tissue. Examples of promoters under developmental control in plants include promoters that initiate transcription preferentially in certain tissues, such as leaves, roots, fruit, seeds, or flowers. A “tissue specific” promoter is a promoter that initiates transcription only in certain tissues. Unlike constitutive expression of genes, tissue-specific expression is the result of several interacting levels of gene regulation. As such, promoters from homologous or closely related plant species can be preferable to use to achieve efficient and reliable expression of transgenes in particular tissues. In some embodiments, the expression comprises a tissue-preferred promoter. A “tissue preferred” promoter is a promoter that initiates transcription preferentially, but not necessarily entirely or solely in certain tissues.

[0201] In some embodiments, the nucleic acid molecules encoding a deaminase described herein comprise a cell type-specific promoter. A “cell type specific” promoter is a promoter that primarily drives expression in certain cell types in one or more organs. Some examples of plant cells in which cell type specific promoters functional in plants may be primarily active include, for example, BETL cells, vascular cells in roots, leaves, stalk cells, and stem cells. The nucleic acid molecules can also include cell type preferred promoters. A “cell type preferred” promoter is a promoter that primarily drives expression mostly, but not necessarily entirely or solely in certain cell types in one or more organs. Some examples of plant cells in which cell type preferred promoters functional in plants may be preferentially active include, for example, BETL cells, vascular cells in roots, leaves, stalk cells, and stem cells.

[0202] In some embodiments, the nucleic acid sequences encoding the deaminases, fusion proteins, and/or gRNAs are operably linked to a promoter sequence that is recognized by a phage RNA polymerase for example, for in vitro mRNA synthesis. In such embodiments, the in vitro-transcribed RNA can be purified for use in the methods described herein. For example, the promoter sequence can be a T7, T3, or SP6 promoter sequence or a variation of a T7, T3, or SP6 promoter sequence. In such embodiments, the expressed protein and/or RNAs can be purified for use in the methods of genome modification described herein.

[0203] In certain embodiments, the polynucleotide encoding the deaminase, fusion protein, and/or gRNA is linked to a polyadenylation signal (e.g., SV40 polyA signal and other signals functional in plants) and/or at least one transcriptional termination sequence. In some embodiments, the sequence encoding the deaminase or fusion protein is linked to sequence(s) encoding at least one nuclear localization signal, at least one cell-penetrating domain, and/or at least one signal peptide capable of trafficking proteins to particular subcellular locations, as described elsewhere herein.

[0204] In some embodiments, the polynucleotide encoding the deaminase, fusion protein, and/or gRNA is present in a vector or multiple vectors. A “vector” refers to a polynucleotide composition for transferring, delivering, or introducing a nucleic acid into a host cell. Suitable vectors include plasmid vectors, phagemids, cosmids, artificial/mini-chromosomes, transposons, and viral vectors (e.g., lentiviral vectors, adeno-associated viral vectors, baculoviral vector). In some embodiments, the vector comprises additional expression control sequences (e.g., enhancer sequences, Kozak sequences, polyadenylation sequences, transcriptional termination sequences), selectable marker sequences (e.g., antibiotic resistance genes), origins of replication, and the like. Additional information can be found in “Current Protocols in Molecular Biology” Ausubel et al., John Wiley & Sons, New York, 2003 or “Molecular Cloning: A Laboratory Manual” Sambrook & Russell, Cold Spring Harbor Press, Cold Spring Harbor, N.Y., 3rd edition, 2001.

[0205] In some embodiments, the vector comprises a selectable marker gene for the selection of transformed cells. Selectable marker genes are utilized for the selection of transformed cells or tissues. Marker genes include genes encoding antibiotic resistance, such as those encoding neomycin phosphotransferase II (NEO) and hygromycin phosphotransferase (HPT), as well as genes conferring resistance to herbicidal compounds, such as glufosinate ammonium, bromoxynil, imidazolinones, and 2,4-dichlorophenoxyacetate (2,4-D).

[0206] In some embodiments, the expression cassette or vector comprising the sequence encoding a fusion protein comprising an RNA-guided DNA-binding polypeptide, such as an RGN, further comprises a sequence encoding a gRNA. In some embodiments, the sequence(s) encoding the gRNA are operably linked to at least one transcriptional control sequence for expression of the gRNA in the organism or host cell of interest. For example, the polynucleotide encoding the gRNA can be operably linked to a promoter sequence that is recognized by RNA polymerase III (Pol III). Examples of suitable Pol III promoters include, but are not limited to, mammalian U6, U3, H1, and 7SL RNA promoters, rice U6 and U3 promoters.

[0207] As indicated, expression constructs comprising nucleotide sequences encoding the deaminases, fusion proteins, and/or gRNAs can be used to transform organisms of interest. Methods for transformation involve introducing a nucleotide construct into an organism of interest. By “introducing” is intended to introduce the nucleotide construct to the host cell in such a manner that the construct gains access to the interior of the host cell. The methods of the invention do not require a particular method for introducing a nucleotide construct to a host organism, only that the nucleotide construct gains access to the interior of at least one cell of the host organism. In some embodiments, an mRNA encoding a deaminase or a fusion protein is introduced into a host cell. In some embodiments wherein the fusion protein comprises a RGDBP, an mRNA encoding the fusion protein is introduced into a cell and a gRNA is introduced into the cell. The host cell can be a eukaryotic or prokaryotic cell. In particular embodiments, the eukaryotic host cell is a plant cell, a mammalian cell, or an insect cell. Methods for introducing nucleotide constructs into plants and other host cells are known in the art including, but not limited to, stable transformation methods, transient transformation methods, and virus-mediated methods.

[0208] The methods result in a transformed organism, such as a plant, including whole plants, as well as plant organs (e.g., leaves, stems, roots, etc.), seeds, plant cells, propagules, embryos and progeny of the same. Plant cells can be differentiated or undifferentiated (e.g. callus, suspension culture cells, protoplasts, leaf cells, root cells, phloem cells, pollen).

[0209] “Transgenic organisms” or “transformed organisms” or “stably transformed” organisms or cells or tissues refers to organisms that have incorporated or integrated a polynucleotide encoding a deaminase of the invention. It is recognized that other exogenous or endogenous nucleic acid sequences or DNA fragments may also be incorporated into the host cell. Agrobacterium-and biolistic-mediated transformation remain the two predominantly employed approaches for transformation of plant cells. However, transformation of a host cell may be performed by infection, transfection, microinjection, electroporation, microprojection, biolistics or particle bombardment, electroporation, silica/carbon fibers, ultrasound mediated, PEG mediated, calcium phosphate co-precipitation, polycation DMSO technique, DEAE dextran procedure, and viral mediated, liposome mediated and the like. Viral-mediated introduction of a polynucleotide encoding a deaminase, fusion protein, and/or gRNA includes retroviral, lentiviral, adenoviral, and adeno-associated viral mediated introduction and expression, as well as the use of Caulimoviruses (e.g., cauliflower mosaic virus), Geminiviruses (e.g., bean golden yellow mosaic virus or maize streak virus), and RNA plant viruses (e.g., tobacco mosaic virus).

[0210] Transformation protocols as well as protocols for introducing polypeptides or polynucleotide sequences into plants may vary depending on the type of host cell (e.g., monocot or dicot plant cell) targeted for transformation. Methods for transformation are known in the art and include those set forth in U.S. Pat. Nos. 8,575,425; 7,692,068; 8,802,934; 7,541,517; each of which is herein incorporated by reference. See, also, Rakoczy-Trojanowska, M. (2002) Cell Mol Biol Lett. 7:849-858; Jones et al. (2005) Plant Methods 1:5; Rivera et al. (2012) Physics of Life Reviews 9:308-345; Bartlett et al. (2008) Plant Methods 4:1-12; Bates, G. W. (1999) Methods in Molecular Biology 111:359-366; Binns and Thomashow (1988) Annual Reviews in Microbiology 42:575-606; Christou, P. (1992) The Plant Journal 2:275-281; Christou, P. (1995) Euphytica 85:13-27; Tzfira et al. (2004) TRENDS in Genetics 20:375-383; Yao et al. (2006) Journal of Experimental Botany 57:3737-3746; Zupan and Zambryski (1995) Plant Physiology 107:1041-1047; Jones et al. (2005) Plant Methods 1:5;

[0211] Transformation may result in stable or transient incorporation of the nucleic acid into the cell. “Stable transformation” is intended to mean that the nucleotide construct introduced into a host cell integrates into the genome of the host cell and is capable of being inherited by the progeny thereof. “Transient transformation” is intended to mean that a polynucleotide is introduced into the host cell and does not integrate into the genome of the host cell.

[0212] Methods for transformation of chloroplasts are known in the art. See, for example, Svab et al. (1990) Proc. Natl. Acad. Sci. USA 87:8526-8530; Svab and Maliga (1993) Proc. Natl. Acad. Sci. USA 90:913-917; Svab and Maliga (1993) EMBO J. 12:601-606. The method relies on particle gun delivery of DNA containing a selectable marker and targeting of the DNA to the plastid genome through homologous recombination. Additionally, plastid transformation can be accomplished by transactivation of a silent plastid-borne transgene by tissue-preferred expression of a nuclear-encoded and plastid-directed RNA polymerase. Such a system has been reported in McBride et al. (1994) Proc. Natl. Acad. Sci. USA 91:7301-7305.

[0213] The cells that have been transformed may be grown into a transgenic organism, such as a plant, in accordance with conventional ways. See, for example, McCormick et al. (1986) Plant Cell Reports 5:81-84. These plants may then be grown, and either pollinated with the same transformed strain or different strains, and the resulting hybrid having the deaminase or fusion protein polynucleotide identified. Two or more generations may be grown to ensure that the deaminase or fusion protein polynucleotide is stably maintained and inherited and then seeds harvested to ensure the presence of the deaminase or fusion protein polynucleotide. In this manner, the present invention provides transformed seed (also referred to as “transgenic seed”) having a nucleotide construct of the invention, for example, an expression cassette of the invention, stably incorporated into their genome.

[0214] In some embodiments, cells that have been transformed are introduced into an organism. These cells could have originated from the organism, wherein the cells are transformed in an ex vivo approach.

[0215] The sequences provided herein may be used for transformation of any plant species, including, but not limited to, monocots and dicots. Examples of plants of interest include, but are not limited to, corn (maize), sorghum, wheat, sunflower, tomato, crucifers, peppers, potato, cotton, rice, soybean, sugarbeet, sugarcane, tobacco, barley, and oilseed rape, Brassica sp., alfalfa, rye, millet, safflower, peanuts, sweet potato, cassava, coffee, coconut, pineapple, citrus trees, cocoa, tea, banana, avocado, fig, guava, mango, olive, papaya, cashew, macadamia, almond, oats, vegetables, ornamentals, and conifers. Vegetables include, but are not limited to, tomatoes, lettuce, green beans, lima beans, peas, and members of the genus Cucumis such as cucumber, cantaloupe, and musk melon. Ornamentals include, but are not limited to, azalea, hydrangea, hibiscus, roses, tulips, daffodils, petunias, carnation, poinsettia, and chrysanthemum. Preferably, plants of the present invention are crop plants (for example, maize, sorghum, wheat, sunflower, tomato, crucifers, peppers, potato, cotton, rice, soybean, sugarbeet, sugarcane, tobacco, barley, oilseed rape, etc.).

[0216] As used herein, the term plant includes plant cells, plant protoplasts, plant cell tissue cultures from which plants can be regenerated, plant calli, plant clumps, and plant cells that are intact in plants or parts of plants such as embryos, pollen, ovules, seeds, leaves, flowers, branches, fruit, kernels, ears, cobs, husks, stalks, roots, root tips, anthers, and the like. Grain is intended to mean the mature seed produced by commercial growers for purposes other than growing or reproducing the species. Progeny, variants, and mutants of the regenerated plants are also included within the scope of the invention, provided that these parts comprise the introduced polynucleotides. Further provided is a processed plant product or byproduct that retains the sequences disclosed herein, including for example, soymeal.

[0217] In some embodiments, the polynucleotides encoding the deaminases, fusion proteins, and/or gRNAs are used to transform any eukaryotic species, including but not limited to animals (e.g., mammals, insects, fish, birds, and reptiles), fungi, amoeba, algae, and yeast. In some embodiments, the polynucleotides encoding the deaminases, fusion proteins, and/or gRNAs are used to transform any prokaryotic species, including but not limited to, archaea and bacteria (e.g., Bacillus spp., Klebsiella spp. Streptomyces spp., Rhizobium spp., Escherichia spp., Pseudomonas spp., Salmonella spp., Shigella spp., Vibrio spp., Yersinia spp., Mycoplasma spp., Agrobacterium spp., and Lactobacillus spp.).

[0218] In some embodiments, conventional viral and non-viral based gene transfer methods are used to introduce nucleic acids in mammalian cells or target tissues. Such methods can be used to administer nucleic acids encoding a deaminase or fusion protein of the invention and optionally a gRNA to cells in culture, or in a host organism. Non-viral vector delivery systems include DNA plasmids, RNA (e.g., a transcript of a vector described herein), naked nucleic acid, and nucleic acid complexed with a delivery vehicle, such as a liposome. Viral vector delivery systems include DNA and RNA viruses, which have either episomal or integrated genomes after delivery to the cell. Non-limiting examples include vectors utilizing Caulimoviruses (e.g., cauliflower mosaic virus), Geminiviruses (e.g., bean golden yellow mosaic virus or maize steak virus), and RNA plant viruses (e.g., tobacco mosaic virus). For a review of gene therapy procedures, see Anderson, Science 256: 808-813 (1992); Nabel & Feigner, TIBTECH 11:211-217 (1993); Mitani & Caskey, TIBTECH 11:162-166 (1993); Dillon, TIBTECH 11:167-175 (1993); Miller, Nature 357:455-460 (1992); Van Brunt, Biotechnology 6(10): 1149-1154 (1988); Vigne, Restorative Neurology and Neuroscience 8:35-36 (1995); Kremer & Perricaudet, British Medical Bulletin 51(1):31-44 (1995); Haddada et al., in Current Topics in Microbiology and Immunology, Doerfler and Bohm (eds) (1995); and Yu et al., Gene Therapy 1:13-26 (1994).

[0219] Methods of non-viral delivery of nucleic acids include lipofection, Agrobacterium-mediated transformation, nucleofection, microinjection, biolistics, virosomes, liposomes, immunoliposomes, polycation or lipid: nucleic acid conjugates, naked DNA, artificial virions, and agent-enhanced uptake of DNA. Lipofection is described in e.g., U.S. Pat. Nos. 5,049,386, 4,946,787; and 4,897,355) and lipofection reagents are sold commercially (e.g., Transfectam™ and Lipofectin™). Cationic and neutral lipids that are suitable for efficient receptor-recognition lipofection of polynucleotides include those of Feigner, WO 91/17424; WO 91/16024. Delivery can be to cells (e.g. in vitro or ex vivo administration) or target tissues (e.g. in vivo administration). The preparation of lipid:nucleic acid complexes, including targeted liposomes such as immunolipid complexes, is well known to one of skill in the art (see, e.g., Crystal, Science 270:404-410 (1995); Blaese et al., Cancer Gene Ther. 2:291-297 (1995); Behr et al., Bioconjugate Chem. 5:382-389 (1994); Remy et al., Bioconjugate Chem. 5:647-654 (1994); Gao et al., Gene Therapy 2:710-722 (1995); Ahmad et al., Cancer Res. 52:4817-4820 (1992); U.S. Pat. Nos. 4,186,183, 4,217,344, 4,235,871, 4,261,975, 4,485,054, 4,501,728, 4,774,085, 4,837,028, and 4,946,787).

[0220] The use of RNA or DNA viral based systems for the delivery of nucleic acids takes advantage of highly evolved processes for targeting a virus to specific cells in the body and trafficking the viral payload to the nucleus. Viral vectors can be administered directly to patients (in vivo) or they can be used to treat cells in vitro, and the modified cells may optionally be administered to patients (ex vivo). Conventional viral based systems could include retroviral, lentivirus, adenoviral, adeno-associated and herpes simplex virus vectors for gene transfer. Integration in the host genome is possible with the retrovirus, lentivirus, and adeno-associated virus gene transfer methods, often resulting in long term expression of the inserted transgene. Additionally, high transduction efficiencies have been observed in many different cell types and target tissues.

[0221] The tropism of a retrovirus can be altered by incorporating foreign envelope proteins, expanding the potential target population of target cells. Lentiviral vectors are retroviral vectors that are able to transduce or infect non-dividing cells and typically produce high viral titers. Selection of a retroviral gene transfer system would therefore depend on the target tissue. Retroviral vectors are comprised of cis-acting long terminal repeats with packaging capacity for up to 6-10 kb of foreign sequence. The minimum cis-acting LTRs are sufficient for replication and packaging of the vectors, which are then used to integrate the therapeutic gene into the target cell to provide permanent transgene expression. Widely used retroviral vectors include those based upon murine leukemia virus (MuLV), gibbon ape leukemia virus (GaLV), Simian Immuno deficiency virus (SIV), human immuno deficiency virus (HIV), and combinations thereof (see, e.g., Buchscher et al., J. Virol. 66:2731-2739 (1992); Johann et al., J. Virol. 66:1635-1640 (1992); Sommnerfelt et al., Virol. 176:58-59 (1990); Wilson et al., J. Virol. 63:2374-2378 (1989); Miller et al., J. Virol. 65:2220-2224 (1991); PCT/US94/05700).

[0222] In applications where transient expression is preferred, adenoviral based systems may be used. Adenoviral based vectors are capable of very high transduction efficiency in many cell types and do not require cell division. With such vectors, high titer and levels of expression have been obtained. This vector can be produced in large quantities in a relatively simple system. Adeno-associated virus (“AAV”) vectors may also be used to transduce cells with target nucleic acids, e.g., in the in vitro production of nucleic acids and peptides, and for in vivo and ex vivo gene therapy procedures (see, e.g., West et al., Virology 160:38-47 (1987); U.S. Pat. No. 4,797,368; WO 93/24641; Katin, Human Gene Therapy 5:793-801 (1994); Muzyczka, J. Clin. Invest. 94:1351 (1994). Construction of recombinant AAV vectors are described in a number of publications, including U.S. Pat. No. 5,173,414; Tratschin et al., Mol. Cell. Biol. 5:3251-3260 (1985); Tratschin, et al., Mol. Cell. Biol. 4:2072-2081 (1984); Hermonat & Muzyczka, PNAS 81:6466-6470 (1984); and Samulski et al., J. Virol. 63:03822-3828 (1989). Packaging cells are typically used to form virus particles that are capable of infecting a host cell. Such cells include 293 cells, which package adenovirus, and ψJ² cells or PA317 cells, which package retrovirus.

[0223] Viral vectors used in gene therapy are usually generated by producing a cell line that packages a nucleic acid vector into a viral particle. The vectors typically contain the minimal viral sequences required for packaging and subsequent integration into a host, other viral sequences being replaced by an expression cassette for the polynucleotide(s) to be expressed. The missing viral functions are typically supplied in trans by the packaging cell line. For example, AAV vectors used in gene therapy typically only possess ITR sequences from the AAV genome which are required for packaging and integration into the host genome. Viral DNA is packaged in a cell line, which contains a helper plasmid encoding the other AAV genes, namely rep and cap, but lacking ITR sequences.

[0224] The cell line may also be infected with adenovirus as a helper. The helper virus promotes replication of the AAV vector and expression of AAV genes from the helper plasmid. The helper plasmid is not packaged in significant amounts due to a lack of ITR sequences. Contamination with adenovirus can be reduced by, e.g., heat treatment to which adenovirus is more sensitive than AAV. Additional methods for the delivery of nucleic acids to cells are known to those skilled in the art. See, for example, US20030087817, incorporated herein by reference.

[0225] Ideally, the coding sequence of an RGN-deaminase fusion protein of the invention and a corresponding guide RNA for targeting the fusion protein may all be packaged into a single AAV vector. The generally accepted size limit for AAV vectors is 4.7 kb, although larger sizes may be contemplated at the expense of reduced packing efficiency. To ensure that the expression cassettes for both the fusion protein and its corresponding guide RNA could fit into an AAV vector, novel, active deletion variants of RGNs such as those set forth as SEQ ID NOs: 97, 98, 106, and 107 or active deletion variants of deaminases may be used such as those described herein set forth as SEQ ID NOs: 2, 4, and 6. In addition to shortening the amino acid sequence and therefore the coding sequence of the RGN and/or the deaminase of the fusion protein, the peptide linker which links the RGN and the deaminase may also be shortened. The USP, if present, and the linker connecting the USP and the RGN-deaminase fusion protein may be shortened. Finally, the genetic elements, such as the promoters, enhancers, and/or terminators, may also be engineered via deletion analysis to determine the minimal size required for each to be functional. The present invention also teaches methods of using said fusion proteins for targeted base editing through in vivo AAV vector delivery.

[0226] In some embodiments, a host cell is transiently or non-transiently transfected with one or more vectors described herein. In some embodiments, a cell is transfected as it naturally occurs in a subject. In some embodiments, a cell that is transfected is taken from a subject.

[0227] In some embodiments, a cell that is transfected is a eukaryotic cell. In some embodiments, the eukaryotic cell is an animal cell (e.g., mammals, insects, fish, birds, and reptiles). In some embodiments, a cell that is transfected is a human cell. In some embodiments, a cell that is transfected is a cell of hematopoietic origin, such as an immune cell (i.e., a cell of the innate or adaptive immune system) including but not limited to a B cell, a T cell, a natural killer (NK) cell, a pluripotent stem cell, an induced pluripotent stem cell, a chimeric antigen receptor T (CAR-T) cell, a monocyte, a macrophage, and a dendritic cell.

[0228] In some embodiments, the cell is derived from cells taken from a subject, such as a cell line. In some embodiments, the cell or cell line is prokaryotic. In some embodiments, the cell or cell line is eukaryotic. In further embodiments, the cell or cell line is derived from insect, avian, plant, or fungal species. In some embodiments, the cell or cell line may be mammalian, such as for example human, monkey, mouse, cow, swine, goat, hamster, rat, cat, or dog. A wide variety of cell lines for tissue culture are known in the art. Examples of cell lines include, but are not limited to, C8161, CCRF-CEM, MOLT, mIMCD-3, NHDF, HeLaS3, Huhl, Huh4, Huh7, HUVEC, HASMC, HEKn, HEKa, MiaPaCell, Panel, PC-3, TFl, CTLL-2, CIR, Rat6, CVI, RPTE, AlO, T24, 182, A375, ARH-77, Calul, SW480, SW620, SKOV3, SK-UT, CaCo2, P388D1, SEM-K2, WEHI-231, HB56, TIB55, lurkat, 145.01, LRMB, Bcl-1, BC-3, IC21, DLD2, Raw264.7, NRK, NRK-52E, MRC5, MEF, Hep G2, HeLa B, HeLa T4. COS, COS-1, COS-6, COS-M6A, BS-C-1 monkey kidney epithelial, BALB/3T3 mouse embryo fibroblast, 3T3 Swiss, 3T3-L1, 132-d5 human fetal fibroblasts; 10.1 mouse fibroblasts, 293-T, 3T3, 721, 9L, A2780, A2780ADR, A2780cis, A172, A20, A253, A431, A-549, ALC, B16, B35, BCP-I cells, BEAS-2B, bEnd.3, BHK-21, BR 293, BxPC3, C3H-10T1/2, C6/36, Cal-27, CHO, CHO-7, CHO-IR, CHO-K1, CHO-K2, CHO-T, CHO Dhfr−/−, COR-L23, COR-L23/CPR, COR-L235010, CORL23/R23, COS-7, COV-434, CML T1, CMT, CT26, D17, DH82, DU145, DuCaP, EL4, EM2, EM3, EMT6/AR1, EMT6/AR10.0, FM3, H1299, H69, HB54, HB55, HCA2, HEK-293, HeLa, Hepa1clc7, HL-60, HMEC, HT-29, lurkat, lY cells, K562 cells, Ku812, KCL22, KG1, KYO1, LNCap, Ma-Mel 1-48, MC-38, MCF-7, MCF-10A, MDA-MB-231, MDA-MB-468, MDA-MB-435, MDCKII, MDCKII, MOR/0.2R, MONO-MAC 6, MTD-1A, MyEnd, NCI-H69/CPR, NCI-H69/LX10, NCI-H69/LX20, NCI-H69/LX4, NIH-3T3, NALM-1, NW-145, OPCN/OPCT cell lines, Peer, PNT-1A/PNT 2, RenCa, RIN-5F, RMA/RMAS, Saos-2 cells, Sf-9, SkBr3, T2, T-47D, T84, THP1 cell line, U373, U87, U937, VCaP, Vero cells, WM39, WT-49, X63, YAC-1, YAR, and transgenic varieties thereof. Cell lines are available from a variety of sources known to those with skill in the art (see, e.g., the American Type Culture Collection (ATCC) (Manassas, Va.)).

[0229] In some embodiments, a cell transfected with one or more vectors described herein is used to establish a new cell line comprising one or more vector-derived sequences. In some embodiments, a cell transiently transfected with a fusion protein of the invention and optionally a gRNA, or with a ribonucleoprotein complex of the invention, and modified through the activity of a fusion protein or ribonucleoprotein complex, is used to establish a new cell line comprising cells containing the modification but lacking any other exogenous sequence. In some embodiments, cells transiently or non-transiently transfected with one or more vectors described herein, or cell lines derived from such cells are used in assessing one or more test compounds.

[0230] In some embodiments, one or more vectors described herein are used to produce a non-human transgenic animal or transgenic plant. In some embodiments, the transgenic animal is an insect. In further embodiments, the insect is an insect pest, such as a mosquito or tick. In some embodiments, the insect is a plant pest, such as a corn rootworm or a fall armyworm. In some embodiments, the transgenic animal is a bird, such as a chicken, turkey, goose, or duck. In some embodiments, the transgenic animal is a mammal, such as a human, mouse, rat, hamster, monkey, ape, rabbit, swine, cow, horse, goat, sheep, cat, or dog.

### VI. Variants and Fragments of Polypeptides and Polynucleotides

[0231] The present disclosure provides cytosine deaminases which are active on DNA molecules, the amino acid sequence of which are set forth as SEQ ID NO: 2, 4, and 6-12, active variants or fragments thereof, and polynucleotides encoding the same.

[0232] While the activity of a variant or fragment may be altered compared to the polynucleotide or polypeptide of interest, the variant and fragment should retain the functionality of the polynucleotide or polypeptide of interest. For example, a variant or fragment may have increased activity, decreased activity, different spectrum of activity or any other alteration in activity when compared to the polynucleotide or polypeptide of interest.

[0233] Fragments and variants of deaminases of the invention which have cytosine deaminase activity will retain said activity if they are part of a fusion protein further comprising a DNA-binding polypeptide or a fragment thereof.

[0234] The term “fragment” refers to a portion of a polynucleotide or polypeptide sequence of the invention. “Fragments” or “biologically active portions” include polynucleotides comprising a sufficient number of contiguous nucleotides to retain the biological activity (i.e., deaminase activity on nucleic acids). “Fragments” or “biologically active portions” include polypeptides comprising a sufficient number of contiguous amino acid residues to retain the biological activity. Fragments of the deaminases disclosed herein include those that are shorter than the full-length sequences due to the use of an alternate downstream start site. In some embodiments, a biologically active portion of a deaminase is a polypeptide that comprises, for example, 10, 20, 30, 40, 50, 60, 70, 80, 90, 100, 110, 120, 130, 140, 150, 160, or more contiguous amino acid residues of any of SEQ ID NOs: 2, 4, and 6-12, or a variant thereof. Such biologically active portions can be prepared by recombinant techniques and evaluated for activity.

[0235] In general, “variants” is intended to mean substantially similar sequences. For polynucleotides, a variant comprises a deletion and/or addition of one or more nucleotides at one or more internal sites within the native polynucleotide and/or a substitution of one or more nucleotides at one or more sites in the native polynucleotide. As used herein, a “native” or “wild type” polynucleotide or polypeptide comprises a naturally occurring nucleotide sequence or amino acid sequence, respectively. For polynucleotides, conservative variants include those sequences that, because of the degeneracy of the genetic code, encode the native amino acid sequence of the gene of interest. Naturally occurring allelic variants such as these can be identified with the use of well-known molecular biology techniques, as, for example, with polymerase chain reaction (PCR) and hybridization techniques as outlined below. Variant polynucleotides also include synthetically derived polynucleotides, such as those generated, for example, by using site-directed mutagenesis but which still encode the polypeptide or the polynucleotide of interest. Generally, variants of a particular polynucleotide disclosed herein will have at least 40%, at least 45%, at least 50%, at least 55%, at least 60%, at least 65%, at least 70%, at least 75%, at least 80%, at least 85%, at least 90%, at least 91%, at least 92%, at least 93%, at least 94%, at least 95%, at least 96%, at least 97%, at least 98%, at least 99% or more sequence identity to that particular polynucleotide as determined by sequence alignment programs and parameters described elsewhere herein.

[0236] Variants of a particular polynucleotide disclosed herein (i.e., the reference polynucleotide) can also be evaluated by comparison of the percent sequence identity between the polypeptide encoded by a variant polynucleotide and the polypeptide encoded by the reference polynucleotide. Percent sequence identity between any two polypeptides can be calculated using sequence alignment programs and parameters described elsewhere herein. Where any given pair of polynucleotides disclosed herein is evaluated by comparison of the percent sequence identity shared by the two polypeptides they encode, the percent sequence identity between the two encoded polypeptides is at least 40%, at least 45%, at least 50%, at least 55%, at least 60%, at least 65%, at least 70%, at least 75%, at least 80%, at least 85%, at least 90%, at least 91%, at least 92%, at least 93%, at least 94%, at least 95%, at least 96%, at least 97%, at least 98%, at least 99% or more sequence identity.

[0237] In particular embodiments, the presently disclosed polynucleotides encode a cytosine deaminase comprising an amino acid sequence having at least 40%, at least 45%, at least 50%, at least 55%, at least 60%, at least 65%, at least 70%, at least 75%, at least 80%, at least 81%, at least 82%, at least 83%, at least 84%, at least 85%, at least 86%, at least 87%, at least 88%, at least 89%, at least 90%, at least 91%, at least 92%, at least 93%, at least 94%, at least 95%, at least 96%, at least 97%, at least 98%, at least 99%, or greater identity to an amino acid sequence of any of SEQ ID NOs: 2, 4, and 6-12.

[0238] A biologically active variant of a cytosine deaminase of the invention may differ by as few as 1-15 amino acid residues, as few as 1-10, such as 6-10, as few as 5, as few as 4, as few as 3, as few as 2, or as few as 1 amino acid residue. In specific embodiments, the polypeptides comprise an N-terminal or a C-terminal truncation, which can comprise at least a deletion of 5, 10, 15, 20, 25, 30, 35, 40, 45, 50, 55, 60 amino acids or more from either the N or C terminus of the polypeptide. In some embodiments, the polypeptides comprise an internal deletion which can comprise at least a deletion of 1, 2, 3, 4, 5, 6, 7, 8, 9, 10, 11, 12, 13, 14, 15, 16, 17, 18, 19, 20, 25, 30, 35, 40, 45, 50, 55, 60 amino acids or more.

[0239] In some embodiments, a biologically active polypeptide variant of SEQ ID NO: 2 does not comprise amino acid residues 1-12 or 195-230 of SEQ ID NO: 1. In certain embodiments, a biologically active variant of SEQ ID NO: 4 does not comprise amino acid residues 1-12 or 198-201 of SEQ ID NO: 3. In particular embodiments, a biologically active variant of SEQ ID NO: 6 does not comprise amino acid residues 1-15 of SEQ ID NO: 5. In certain embodiments, the deaminase has an amino acid sequence having at least 90% sequence identity to SEQ ID NO: 2 and does not comprise amino acid residues 1-12 or 195-230 of SEQ ID NO: 1. In some embodiments, the deaminase has an amino acid sequence having at least 95% sequence identity to SEQ ID NO: 4 and does not comprise amino acid residues 1-12 or 198-201 of SEQ ID NO: 3. In some embodiments, the deaminase has an amino acid sequence having at least 95% sequence identity to SEQ ID NO: 6 and does not comprise amino acid residues 1-15 of SEQ ID NO: 5.

[0240] It is recognized that modifications may be made to the deaminases provided herein creating variant proteins and polynucleotides. Changes designed by man may be introduced through the application of site-directed mutagenesis techniques. In some embodiments, native, as yet-unknown or as yet unidentified polynucleotides and/or polypeptides structurally and/or functionally-related to the sequences disclosed herein may also be identified that fall within the scope of the present invention. Conservative amino acid substitutions may be made in nonconserved regions that do not alter the function of the polypeptide as a cytosine deaminase. In some embodiments, modifications are made that improve the cytosine deaminase activity of the deaminase.

[0241] Variant polynucleotides and proteins also encompass sequences and proteins derived from a mutagenic and recombinogenic procedure such as DNA shuffling. With such a procedure, one or more different deaminases disclosed herein (e.g., SEQ ID NOs: 2, 4, and 6-12) is manipulated to create a new cytosine deaminase possessing the desired properties. In this manner, libraries of recombinant polynucleotides are generated from a population of related sequence polynucleotides comprising sequence regions that have substantial sequence identity and can be homologously recombined in vitro or in vivo. For example, using this approach, sequence motifs encoding a domain of interest may be shuffled between the deaminase sequences provided herein and other subsequently identified deaminase genes to obtain a new gene coding for a protein with an improved property of interest, such as an increased Kₘ in the case of an enzyme. Strategies for such DNA shuffling are known in the art. See, for example, Stemmer (1994) Proc. Natl. Acad. Sci. USA 91:10747-10751; Stemmer (1994) Nature 370:389-391; Crameri et al. (1997) Nature Biotech. 15:436-438; Moore et al. (1997) J. Mol. Biol. 272:336-347; Zhang et al. (1997) Proc. Natl. Acad. Sci. USA 94:4504-4509; Crameri et al. (1998) Nature 391:288-291; and U.S. Pat. Nos. 5,605,793 and 5,837,458. A “shuffled” nucleic acid is a nucleic acid produced by a shuffling procedure such as any shuffling procedure set forth herein. Shuffled nucleic acids are produced by recombining (physically or virtually) two or more nucleic acids (or character strings), for example in an artificial, and optionally recursive, fashion. Generally, one or more screening steps are used in shuffling processes to identify nucleic acids of interest; this screening step can be performed before or after any recombination step. In some (but not all) shuffling embodiments, it is desirable to perform multiple rounds of recombination prior to selection to increase the diversity of the pool to be screened. The overall process of recombination and selection are optionally repeated recursively. Depending on context, shuffling can refer to an overall process of recombination and selection, or, alternately, can simply refer to the recombinational portions of the overall process.

[0242] As used herein, “sequence identity” or “identity” in the context of two polynucleotides or polypeptide sequences makes reference to the residues in the two sequences that are the same when aligned for maximum correspondence over a specified comparison window. When percentage of sequence identity is used in reference to proteins it is recognized that residue positions which are not identical often differ by conservative amino acid substitutions, where amino acid residues are substituted for other amino acid residues with similar chemical properties (e.g., charge or hydrophobicity) and therefore do not change the functional properties of the molecule. When sequences differ in conservative substitutions, the percent sequence identity may be adjusted upwards to correct for the conservative nature of the substitution. Sequences that differ by such conservative substitutions are said to have “sequence similarity” or “similarity”. Means for making this adjustment are well known to those of skill in the art. Typically, this involves scoring a conservative substitution as a partial rather than a full mismatch, thereby increasing the percentage sequence identity. Thus, for example, where an identical amino acid is given a score of 1 and a non-conservative substitution is given a score of zero, a conservative substitution is given a score between zero and 1. The scoring of conservative substitutions is calculated, e.g., as implemented in the program PC/GENE (Intelligenetics, Mountain View, California).

[0243] As used herein, “percentage of sequence identity” means the value determined by comparing two optimally aligned sequences over a comparison window, wherein the portion of the polynucleotide sequence in the comparison window may comprise additions or deletions (i.e., gaps) as compared to the reference sequence (which does not comprise additions or deletions) for optimal alignment of the two sequences. The percentage is calculated by determining the number of positions at which the identical nucleic acid base or amino acid residue occurs in both sequences to yield the number of matched positions, dividing the number of matched positions by the total number of positions in the window of comparison, and multiplying the result by 100 to yield the percentage of sequence identity.

[0244] Unless otherwise stated, sequence identity/similarity values provided herein refer to the value obtained using GAP Version 10 using the following parameters: % identity and % similarity for a nucleotide sequence using GAP Weight of 50 and Length Weight of 3, and the nwsgapdna.cmp scoring matrix; % identity and % similarity for an amino acid sequence using GAP Weight of 8 and Length Weight of 2, and the BLOSUM62 scoring matrix; or any equivalent program thereof. By “equivalent program” is intended any sequence comparison program that, for any two sequences in question, generates an alignment having identical nucleotide or amino acid residue matches and an identical percent sequence identity when compared to the corresponding alignment generated by GAP Version 10.

[0245] Two sequences are “optimally aligned” when they are aligned for similarity scoring using a defined amino acid substitution matrix (e.g., BLOSUM62), gap existence penalty and gap extension penalty so as to arrive at the highest score possible for that pair of sequences. Amino acid substitution matrices and their use in quantifying the similarity between two sequences are well-known in the art and described, e.g., in Dayhoff et al. (1978) “A model of evolutionary change in proteins.” In “Atlas of Protein Sequence and Structure,” Vol. 5, Suppl. 3 (ed. M. O. Dayhoff), pp. 345-352. Natl. Biomed. Res. Found., Washington, D.C. and Henikoff et al. (1992) Proc. Natl. Acad. Sci. USA 89:10915-10919. The BLOSUM62 matrix is often used as a default scoring substitution matrix in sequence alignment protocols. The gap existence penalty is imposed for the introduction of a single amino acid gap in one of the aligned sequences, and the gap extension penalty is imposed for each additional empty amino acid position inserted into an already opened gap. The alignment is defined by the amino acids positions of each sequence at which the alignment begins and ends, and optionally by the insertion of a gap or multiple gaps in one or both sequences, so as to arrive at the highest possible score. While optimal alignment and scoring can be accomplished manually, the process is facilitated by the use of a computer-implemented alignment algorithm, e.g., gapped BLAST 2.0, described in Altschul et al. (1997) Nucleic Acids Res. 25:3389-3402, and made available to the public at the National Center for Biotechnology Information Website (www.ncbi.nlm.nih.gov). Optimal alignments, including multiple alignments, can be prepared using, e.g., PSI-BLAST, available through www.ncbi.nlm.nih.gov and described by Altschul et al. (1997) Nucleic Acids Res. 25:3389-3402.

[0246] With respect to an amino acid sequence that is optimally aligned with a reference sequence, an amino acid residue “corresponds to” the position in the reference sequence with which the residue is paired in the alignment. The “position” is denoted by a number that sequentially identifies each amino acid in the reference sequence based on its position relative to the N-terminus. Owing to deletions, insertion, truncations, fusions, etc., that must be taken into account when determining an optimal alignment, in general the amino acid residue number in a test sequence as determined by simply counting from the N-terminal will not necessarily be the same as the number of its corresponding position in the reference sequence. For example, in a case where there is a deletion in an aligned test sequence, there will be no amino acid that corresponds to a position in the reference sequence at the site of deletion. Where there is an insertion in an aligned reference sequence, that insertion will not correspond to any amino acid position in the reference sequence. In the case of truncations or fusions there can be stretches of amino acids in either the reference or aligned sequence that do not correspond to any amino acid in the corresponding sequence.

### VII. Antibodies

[0247] Antibodies to the deaminases, fusion proteins, or ribonucleoproteins comprising the deaminases of the present invention, including those having the amino acid sequence set forth as any one of SEQ ID NOs: 2, 4, and 6-12 or active variants or fragments thereof, are also encompassed. Methods for producing antibodies are well known in the art (see, for example, Harlow and Lane (1988) Antibodies: A Laboratory Manual, Cold Spring Harbor Laboratory, Cold Spring Harbor, N.Y.; and U.S. Pat. No. 4,196,265). These antibodies can be used in kits for the detection and isolation of deaminases or fusion proteins or ribonucleoproteins comprising deaminases described herein. Thus, this disclosure provides kits comprising antibodies that specifically bind to the polypeptides or ribonucleoproteins described herein, including, for example, polypeptides comprising a sequence of at least 85% identity to any of SEQ ID NOs: 2, 4, and 6-12.

### VIII. Systems and Ribonucleoprotein Complexes for Binding and or Modifying a Target Sequence of Interest and Methods of Making the Same

[0248] The present disclosure provides a system which targets to a nucleic acid sequence and modifies a target nucleic acid sequence. In some embodiments, an RNA-guided, DNA-binding polypeptide, such as an RGN, and the gRNA are responsible for targeting the ribonucleoprotein complex to a nucleic acid sequence of interest; the deaminase polypeptide fused to the RGDBP is responsible for modifying the targeted nucleic acid sequence from C>N. In some embodiments, the deaminase converts C>T. In some embodiments, the deaminase converts C>G. The guide RNA hybridizes to the target sequence of interest and also forms a complex with the RNA-guided, DNA-binding polypeptide, thereby directing the RNA-guided, DNA-binding polypeptide to bind to the target sequence. The RNA-guided, DNA-binding polypeptide is part of a fusion protein that also comprises a deaminase described herein. In some embodiments, the RNA-guided, DNA-binding polypeptide is an RGN, such as a Cas9. Other examples of RNA-guided, DNA-binding polypeptides include RGNs such as those described in International Patent Application Publication Nos. WO 2019/236566 and WO 2020/139783, each of which is incorporated by reference in its entirety. In some embodiments, the RNA-guided, DNA-binding polypeptide is a Type II CRISPR-Cas polypeptide, or an active variant or fragment thereof. In some embodiments, the RNA-guided, DNA-binding polypeptide is a Type V CRISPR-Cas polypeptide, or an active variant or fragment thereof. In some embodiments, the RNA-guided, DNA-binding polypeptide is a Type VI CRISPR-Cas polypeptide. In some embodiments, the DNA-binding polypeptide of the fusion protein does not require an RNA guide, such as a zinc finger nuclease, TALEN, or meganuclease polypeptide. In some embodiments, the nuclease activity of a DNA-binding polypeptide has been partially or completely inactivated. In further embodiments, the RNA-guided, DNA-binding polypeptide comprises an amino acid sequence of an RGN, such as for example APG07433.1 (SEQ ID NO: 74), or an active variant or fragment thereof such as nickase nAPG07433.1 (SEQ ID NO: 75) or other nickase RGN variants (SEQ ID NOs: 75 and 88-98).

[0249] In some embodiments, the system for binding and modifying a target sequence of interest provided herein is a ribonucleoprotein complex, which is at least one molecule of an RNA bound to at least one protein. The ribonucleoprotein complexes provided herein comprise at least one guide RNA as the RNA component and a fusion protein comprising a deaminase of the invention and an RNA-guided, DNA-binding polypeptide as the protein component. In some embodiments, the ribonucleoprotein complex is purified from a cell or organism that has been transformed with polynucleotides that encode the fusion protein and a guide RNA and cultured under conditions to allow for the expression of the fusion protein and guide RNA.

[0250] Methods are provided for making a deaminase, a fusion protein, or a fusion protein ribonucleoprotein complex. Such methods comprise culturing a cell comprising a nucleotide sequence encoding a deaminase, a fusion protein, and in some embodiments a nucleotide sequence encoding a guide RNA, under conditions in which the deaminase or fusion protein (and in some embodiments, the guide RNA) is expressed. The deaminase, fusion protein, or fusion ribonucleoprotein can then be purified from a lysate of the cultured cells.

[0251] Methods for purifying a deaminase, fusion protein, or fusion ribonucleoprotein complex from a lysate of a biological sample are known in the art (e.g., size exclusion and/or affinity chromatography, 2D-PAGE, HPLC, reversed-phase chromatography, immunoprecipitation). In particular methods, the deaminase or fusion protein is recombinantly produced and comprises a purification tag to aid in its purification, including but not limited to, glutathione-S-transferase (GST), chitin binding protein (CBP), maltose binding protein, thioredoxin (TRX), poly(NANP), tandem affinity purification (TAP) tag, myc, AcV5, AU1, AU5, E, ECS, E2, FLAG, HA, nus, Softag 1, Softag 3, Strep, SBP, Glu-Glu, HSV, KT3, S, S1, T7, V5, VSV-G, 6×His, biotin carboxyl carrier protein (BCCP), and calmodulin. Generally, the tagged deaminase, fusion protein, or fusion ribonucleoprotein complex is purified using immunoprecipitation or other similar methods known in the art.

[0252] An “isolated” or “purified” polypeptide, or biologically active portion thereof, is substantially or essentially free from components that normally accompany or interact with the polypeptide as found in its naturally occurring environment. Thus, an isolated or purified polypeptide is substantially free of other cellular material, or culture medium when produced by recombinant techniques, or substantially free of chemical precursors or other chemicals when chemically synthesized. A protein that is substantially free of cellular material includes preparations of protein having less than 30%, less than 20%, less than 10%, less than 5%, or less than 1% (by dry weight) of contaminating protein. When the protein of the invention or biologically active portion thereof is recombinantly produced, optimally culture medium represents less than 30%, less than 20%, less than 10%, less than 5%, or less than 1% (by dry weight) of chemical precursors or non-protein-of-interest chemicals.

[0253] Particular methods provided herein for binding and/or cleaving a target sequence of interest involve the use of an in vitro assembled ribonucleoprotein complex. In vitro assembly of a ribonucleoprotein complex can be performed using any method known in the art in which an RGDBP polypeptide or a fusion protein comprising the same is contacted with a guide RNA under conditions to allow for binding of the RGDBP polypeptide or fusion protein comprising the same to the guide RNA. As used herein, “contact”, “contacting”, “contacted,” refer to placing the components of a desired reaction together under conditions suitable for carrying out the desired reaction. The RGDBP polypeptide or fusion protein comprising the same can be purified from a biological sample, cell lysate, or culture medium, produced via in vitro translation, or chemically synthesized. The guide RNA can be purified from a biological sample, cell lysate, or culture medium, transcribed in vitro, or chemically synthesized. The RGDBP polypeptide or fusion protein comprising the same and guide RNA can be brought into contact in solution (e.g., buffered saline solution) to allow for in vitro assembly of the ribonucleoprotein complex.

### IX. Methods of Modifying a Target Sequence

[0254] The present disclosure provides methods for modifying a target nucleic acid molecule (e.g., target DNA molecule) of interest. The methods include delivering a fusion protein comprising a DNA-binding polypeptide and at least one deaminase of the invention or a polynucleotide encoding the same to a target sequence or a cell, organelle, or embryo comprising a target sequence. In certain embodiments, the methods include delivering a system comprising at least one guide RNA or a polynucleotide encoding the same, and at least one fusion protein comprising at least one deaminase of the invention and an RNA-guided, DNA-binding polypeptide or a polynucleotide encoding the same to the target sequence or a cell, organelle, or embryo comprising the target sequence. In some embodiments, the fusion protein comprises any one of the amino acid sequences of SEQ ID NOs: 2, 4, and 6-12, or an active variant or fragment thereof.

[0255] In some embodiments, the methods comprise contacting a DNA molecule with (a) a fusion protein comprising a deaminase and an RNA-guided, DNA-binding polypeptide, such as for example a nuclease-inactive or a nickase RGN; and (b) a gRNA targeting the fusion protein of (a) to a target nucleotide sequence of the DNA molecule; wherein the DNA molecule is contacted with the fusion protein and the gRNA in an amount effective and under conditions suitable for the deamination of a nucleobase. In some embodiments, the target DNA molecule comprises a sequence associated with a disease or disorder, and wherein the deamination of the nucleobase results in a sequence that is not associated with a disease or disorder. In some embodiments, the disease or disorder affects animals. In further embodiments, the disease or disorder affects mammals, such as humans, cows, horses, dogs, cats, goats, sheep, swine, monkeys, rats, mice, or hamsters. In some embodiments, the target DNA sequence resides in an allele of a crop plant, wherein the particular allele of the trait of interest results in a plant of lesser agronomic value. The deamination of the nucleobase results in an allele that improves the trait and increases the agronomic value of the plant.

[0256] In those embodiments wherein the method comprises delivering a polynucleotide encoding a guide RNA and/or a fusion protein, the cell or embryo can then be cultured under conditions in which the guide RNA and/or fusion protein are expressed. In various embodiments, the method comprises contacting a target sequence with a ribonucleoprotein complex comprising a gRNA and a fusion protein (which comprises a deaminase of the invention and an RNA-guided DNA-binding polypeptide). In certain embodiments, the method comprises introducing into a cell, organelle, or embryo comprising a target sequence a ribonucleoprotein complex of the invention. The ribonucleoprotein complex of the invention can be one that has been purified from a biological sample, recombinantly produced and subsequently purified, or in vitro-assembled as described herein. In those embodiments wherein the ribonucleoprotein complex that is contacted with the target sequence or a cell organelle, or embryo has been assembled in vitro, the method can further comprise the in vitro assembly of the complex prior to contact with the target sequence, cell, organelle, or embryo.

[0257] A purified or in vitro assembled ribonucleoprotein complex of the invention can be introduced into a cell, organelle, or embryo using any method known in the art, including, but not limited to electroporation. In some embodiments, a fusion protein comprising a deaminase of the invention and an RNA-guided, DNA-binding polypeptide, and a polynucleotide encoding or comprising the guide RNA is introduced into a cell, organelle, or embryo using any method known in the art (e.g., electroporation).

[0258] Upon delivery to or contact with the target sequence or cell, organelle, or embryo comprising the target sequence, the guide RNA directs the fusion protein to bind to the target sequence in a sequence-specific manner. The target sequence can subsequently be modified via the deaminase of the fusion protein. In some embodiments, the binding of this fusion protein to a target sequence results in modification of a nucleotide adjacent to the target sequence. The nucleobase adjacent to the target sequence that is modified by the deaminase may be 1, 2, 3, 4, 5, 6, 7, 8, 9, 10, 11, 12, 13, 14, 15, 16, 17, 18, 19, 20, 25, 30, 35, 40, 45, 50, 55, 60, 65, 70, 75, 80, 85, 90, 95, or 100 base pairs from the 5′ or 3′ end of the target sequence. A fusion protein comprising a deaminase of the invention and an RNA-guided, DNA-binding polypeptide can introduce targeted C>N mutations in the targeted DNA molecule. In some embodiments, the fusion protein introduces targeted C>T mutations in the targeted DNA molecule. In certain embodiments, the fusion protein introduces targeted C>G mutations in the targeted DNA molecule.

[0259] Methods to measure binding of the fusion protein to a target sequence are known in the art and include chromatin immunoprecipitation assays, gel mobility shift assays, DNA pull-down assays, reporter assays, microplate capture and detection assays. Likewise, methods to measure cleavage or modification of a target sequence are known in the art and include in vitro or in vivo cleavage assays wherein cleavage is confirmed using PCR, sequencing, or gel electrophoresis, with or without the attachment of an appropriate label (e.g., radioisotope, fluorescent substance) to the target sequence to facilitate detection of degradation products. In some embodiments, the nicking triggered exponential amplification reaction (NTEXPAR) assay is used (see, e.g., Zhang et al. (2016) Chem. Sci. 7:4951-4957). In vivo cleavage can be evaluated using the Surveyor assay (Guschin et al. (2010) Methods Mol Biol 649:247-256).

[0260] In some embodiments, the methods involve the use of an RNA-binding, DNA-guided polypeptide, as part of the fusion protein, complexed with more than one guide RNA. The more than one guide RNA can target different regions of a single gene or can target multiple genes. This multiple targeting enables the deaminase of the fusion protein to modify nucleic acids, thereby introducing multiple mutations in the target nucleic acid molecule (e.g., genome) of interest.

[0261] In those embodiments wherein the method involves the use of an RNA-guided nuclease (RGN), such as a nickase RGN (i.e., is only able to cleave a single strand of a double-stranded polynucleotide, for example nAPG07433.1 (SEQ ID NO: 75 or SEQ ID NOs: 88-98), the method can comprise introducing two different RGNs or RGN variants that target identical or overlapping target sequences and cleave different strands of the polynucleotide. For example, an RGN nickase that only cleaves the positive (+) strand of a double-stranded polynucleotide can be introduced along with a second RGN nickase that only cleaves the negative (−) strand of a double-stranded polynucleotide. In some embodiments, two different fusion proteins are provided, where each fusion protein comprises a different RGN with a different PAM recognition sequence, so that a greater diversity of nucleotide sequences may be targeted for mutation.

[0262] One of ordinary skill in the art will appreciate that any of the presently disclosed methods can be used to target a single target sequence or multiple target sequences. Thus, methods comprise the use of a fusion protein comprising a single RNA-guided, DNA-binding polypeptide in combination with multiple, distinct guide RNAs, which can target multiple, distinct sequences within a single gene and/or multiple genes. The deaminase of the fusion protein would then introduce mutations at each of the targeted sequences. Also encompassed herein are methods wherein multiple, distinct guide RNAs are introduced in combination with multiple, distinct RNA-guided, DNA binding polypeptides. Such RNA-guided, DNA-binding polypeptides may be multiple RGN or RGN variants. These guide RNAs and guide RNA/fusion protein systems can target multiple, distinct sequences within a single gene and/or multiple genes.

[0263] In some embodiments, a fusion protein comprising an RNA-guided, DNA-binding polypeptide and a deaminase polypeptide of the invention may be used for generating mutations in a targeted gene or targeted region of a gene of interest. In some embodiments, a fusion protein of the invention may be used for saturation mutagenesis of a targeted gene or region of a targeted gene of interest followed by high-throughput forward genetic screening to identify novel mutations and/or phenotypes. In some embodiments, a fusion protein described herein may be used for generating mutations in a targeted genomic location, which may or may not comprise coding DNA sequence. Libraries of cell lines generated by the targeted mutagenesis described above may also be useful for study of gene function or gene expression.

### X. Target Polynucleotides

[0264] In one aspect, the invention provides for methods of modifying a target polynucleotide in a eukaryotic cell, which may be in vivo, ex vivo or in vitro. In some embodiments, the method comprises sampling a cell or population of cells from a human or non-human animal or plant (including microalgae) and modifying the cell or cells. Culturing may occur at any stage ex vivo. The cell or cells may even be re-introduced into the human, non-human animal or plant (including micro-algae).

[0265] Using natural variability, plant breeders combine most useful genes for desirable qualities, such as yield, quality, uniformity, hardiness, and resistance against pests. These desirable qualities also include growth, day length preferences, temperature requirements, initiation date of floral or reproductive development, fatty acid content, insect resistance, disease resistance, nematode resistance, fungal resistance, herbicide resistance, tolerance to various environmental factors including drought, heat, wet, cold, wind, and adverse soil conditions including high salinity. The sources of these useful genes include native or foreign varieties, heirloom varieties, wild plant relatives, and induced mutations, e.g., treating plant material with mutagenic agents. Using the present invention, plant breeders are provided with a new tool to induce mutations. Accordingly, one skilled in the art can employ the present invention to induce the rise of useful genes, with more precision than previous mutagenic agents and hence accelerate and improve plant breeding programs.

[0266] The target polynucleotide of a deaminase or a fusion protein of the invention can be any polynucleotide endogenous or exogenous to the eukaryotic cell. For example, the target polynucleotide can be a polynucleotide residing in the nucleus of the eukaryotic cell. In some embodiments, the target polynucleotide is a sequence coding a gene product (e.g., a protein) or a non-coding sequence (e.g., a regulatory polynucleotide or a junk DNA). In some embodiments, the target sequence for a fusion protein of the invention is associated with a PAM (protospacer adjacent motif); that is, a short sequence recognized by the RNA-guided DNA-binding polypeptide. The precise sequence and length requirements for the PAM differ depending on the RNA-guided DNA-binding polypeptide used, but PAMs are typically 2-5 base pair sequences adjacent the protospacer (that is, the target sequence).

[0267] The target polynucleotide of a fusion protein of the invention may include a number of disease-associated genes and polynucleotides as well as signaling biochemical pathway-associated genes and polynucleotides. Examples of target polynucleotides include a sequence associated with a signaling biochemical pathway, e.g., a signaling biochemical pathway-associated gene or polynucleotide. Examples of target polynucleotides include a disease associated gene or polynucleotide. A “disease-associated” gene or polynucleotide refers to any gene or polynucleotide which is yielding transcription or translation products at an abnormal level or in an abnormal form in cells derived from a disease-affected tissue compared with tissues or cells of a non-disease control. It may be a gene that becomes expressed at an abnormally high level; it may be a gene that becomes expressed at an abnormally low level, where the altered expression correlates with the occurrence and/or progression of the disease. A disease-associated gene also refers to a gene possessing mutation(s) or genetic variation that is directly responsible or is in linkage disequilibrium with a gene(s) that is responsible for the etiology of a disease (e.g., a causal mutation). The transcribed or translated products may be known or unknown, and further may be at a normal or abnormal level.

[0268] Non-limiting examples of disease-associated genes that can be targeted using the presently disclosed methods and compositions are provided in Table 23. In some embodiments, the disease-associated gene that is targeted are those disclosed in Table 23 having a T>C or G>C mutation. Additional examples of disease-associated genes and polynucleotides are available from McKusick-Nathans Institute of Genetic Medicine, Johns Hopkins University (Baltimore, Md.) and National Center for Biotechnology Information, National Library of Medicine (Bethesda, Md.), available on the World Wide Web.

[0269] In some embodiments, the methods comprise contacting a DNA molecule comprising a target DNA sequence with a DNA-binding polypeptide-deaminase fusion protein of the invention, wherein the DNA molecule is contacted with the fusion protein in an amount effective and under conditions suitable for the deamination of a nucleobase. In certain embodiments, the methods comprise contacting a DNA molecule comprising a target DNA sequence with (a) an RGN-deaminase fusion protein of the invention; and (b) a gRNA targeting the fusion protein of (a) to a target nucleotide sequence of the DNA strand; wherein the DNA molecule is contacted with the fusion protein and the gRNA in an amount effective and under conditions suitable for the deamination of a nucleobase. In some embodiments, the target DNA sequence comprises a sequence associated with a disease or disorder, and wherein the deamination of the nucleobase results in a sequence that is not associated with a disease or disorder. In some embodiments, the target DNA sequence resides in an allele of a crop plant, wherein the particular allele of the trait of interest results in a plant of lesser agronomic value. The deamination of the nucleobase results in an allele that improves the trait and increases the agronomic value of the plant.

[0270] In some embodiments, the target DNA sequence comprises a T>C or G>C point mutation associated with a disease or disorder, and wherein the deamination of the mutant C base results in a sequence that is not associated with a disease or disorder. In some embodiments, the deamination corrects a point mutation in the sequence associated with the disease or disorder.

[0271] In some embodiments, the sequence associated with the disease or disorder encodes a protein, and the deamination introduces a stop codon into the sequence associated with the disease or disorder, resulting in a truncation of the encoded protein. In some embodiments, the contacting is performed in vivo in a subject susceptible to having, having, or diagnosed with the disease or disorder. In some embodiments, the disease or disorder is a disease associated with a point mutation, or a single-base mutation, in the genome. In some embodiments, the disease is a genetic disease, a cancer, a metabolic disease, or a lysosomal storage disease.

### XI. Pharmaceutical Compositions and Methods of Treatment

[0272] Methods of treating a disease in a subject in need thereof are provided herein. The methods comprise administering to a subject in need thereof an effective amount of a presently disclosed fusion protein or a polynucleotide encoding the same, a presently disclosed gRNA or a polynucleotide encoding the same, a presently disclosed fusion protein system, or a cell modified by or comprising any one of these compositions.

[0273] In some embodiments, the treatment comprises in vivo gene editing by administering to a subject in need thereof a presently disclosed fusion protein, gRNA, or a presently disclosed fusion protein system or polynucleotide(s) encoding the same. In some embodiments, the treatment comprises ex vivo gene editing wherein cells are genetically modified ex vivo with a presently disclosed fusion protein, gRNA, or a presently disclosed fusion protein system or polynucleotide(s) encoding the same and then the modified cells are administered to a subject. In some embodiments, the genetically modified cells originate from the subject that is then administered the modified cells, and the transplanted cells are referred to herein as autologous. In some embodiments, the genetically modified cells originate from a different subject (i.e., donor) within the same species as the subject that is administered the modified cells (i.e., recipient), and the transplanted cells are referred to herein as allogeneic. In some examples described herein, the cells can be expanded in culture prior to administration to a subject in need thereof.

[0274] In some embodiments, the disease to be treated with the presently disclosed compositions is one that can be treated with immunotherapy, such as with a chimeric antigen receptor (CAR) T cell. Such diseases include but are not limited to cancer.

[0275] In some embodiments, the deamination of the target nucleobase results in the correction of a genetic defect or in the correction of a point mutation that leads to a loss of function in a gene product. In some embodiments, the genetic defect is associated with a disease or disorder, e.g., a lysosomal storage disorder or a metabolic disease, such as, for example, type I diabetes. Thus, in some embodiments, the disease to be treated with the presently disclosed compositions is associated with a sequence (i.e., the sequence is causal for the disease or disorder or causal for symptoms associated with the disease or disorder) that is mutated in order to treat the disease or disorder or the reduction of symptoms associated with the disease or disorder.

[0276] In some embodiments, the disease to be treated with the presently disclosed compositions is associated with a causal mutation. As used herein, a “causal mutation” refers to a particular nucleotide, nucleotides, or nucleotide sequence in the genome that contributes to the severity or presence of a disease or disorder in a subject. The correction of the causal mutation leads to the improvement of at least one symptom resulting from a disease or disorder. In some embodiments, the correction of the causal mutation leads to the improvement of at least one symptom resulting from a disease or disorder. In some embodiments, the causal mutation is adjacent to a PAM site recognized by the RGDBP (e.g., RGN) fused to a deaminase disclosed herein. The causal mutation can be corrected with a fusion polypeptide comprising a RGDBP (e.g., RGN) and a presently disclosed deaminase. Non-limiting examples of diseases associated with a causal mutation include cystic fibrosis, Niemann-Pick disease, diseases caused by splice site disruptions, and the diseases listed in Table 23. Additional non-limiting examples of disease-associated genes and mutations are available from McKusick-Nathans Institute of Genetic Medicine, Johns Hopkins University (Baltimore, Md.) and National Center for Biotechnology Information, National Library of Medicine (Bethesda, Md.), available on the World Wide Web.

[0277] In some embodiments, the methods provided herein are used to introduce a deactivating point mutation into a gene or allele that encodes a gene product that is associated with a disease or disorder. For example, in some embodiments, methods are provided herein that employ a fusion protein to introduce a deactivating point mutation into an oncogene (e.g., in the treatment of a proliferative disease). A deactivating mutation may, in some embodiments, generate a premature stop codon in a coding sequence, which results in the expression of a truncated gene product, e.g., a truncated protein lacking the function of the full-length protein. In some embodiments, the purpose of the methods provided herein is to restore the function of a dysfunctional gene via genome editing. The fusion proteins provided herein can be validated for gene editing-based human therapeutics in vitro, e.g., by correcting a disease associated mutation in human cell culture. It will be understood by the skilled artisan that the fusion proteins provided herein, e.g., the fusion proteins comprising an RNA-guided, DNA-binding polypeptide and deaminase polypeptide can be used to correct any single point T>C or G>C mutation. Deamination of the mutant C to T or G leads to a correction of the mutation.

[0278] As used herein, “treatment” or “treating,” or “palliating” or “ameliorating” are used interchangeably. These terms refer to an approach for obtaining beneficial or desired results including but not limited to a therapeutic benefit and/or a prophylactic benefit. By therapeutic benefit is meant any therapeutically relevant improvement in or effect on one or more diseases, conditions, or symptoms under treatment. For prophylactic benefit, the compositions may be administered to a subject at risk of developing a particular disease, condition, or symptom, or to a subject reporting one or more of the physiological symptoms of a disease, even though the disease, condition, or symptom may not have yet been manifested.

[0279] The term “effective amount” or “therapeutically effective amount” refers to the amount of an agent that is sufficient to effect beneficial or desired results. The therapeutically effective amount may vary depending upon one or more of: the subject and disease condition being treated, the weight and age of the subject, the severity of the disease condition, the manner of administration and the like, which can readily be determined by one of ordinary skill in the art. The specific dose may vary depending on one or more of: the particular agent chosen, the dosing regimen to be followed, whether it is administered in combination with other compounds, timing of administration, and the delivery system in which it is carried.

[0280] The term “administering” refers to the placement of an active ingredient into a subject, by a method or route that results in at least partial localization of the introduced active ingredient at a desired site, such as a site of injury or repair, such that a desired effect(s) is produced. In those embodiments wherein cells are administered, the cells can be administered by any appropriate route that results in delivery to a desired location in the subject where at least a portion of the implanted cells or components of the cells remain viable. The period of viability of the cells after administration to a subject can be as short as a few hours, e.g., twenty-four hours, to a few days, to as long as several years, or even the life time of the patient, i.e., long-term engraftment. For example, in some aspects described herein, an effective amount of photoreceptor cells or retinal progenitor cells is administered via a systemic route of administration, such as an intraperitoneal or intravenous route.

[0281] In some embodiments, the administering comprises administering by viral delivery. In some embodiments, the administering comprises administering by electroporation. In some embodiments, the administering comprises administering by nanoparticle delivery. In some embodiments, the administering comprises administering by liposome delivery. Any effective route of administration can be used to administer an effective amount of a pharmaceutical composition described herein. In some embodiments, the administering comprises administering by a method selected from the group consisting of: intravenously, subcutaneously, intramuscularly, orally, rectally, by aerosol, parenterally, ophthalmicly, pulmonarily, transdermally, vaginally, otically, nasally, and by topical administration, or any combination thereof. In some embodiments, for the delivery of cells, administration by injection or infusion is used.

[0282] As used herein, the term “subject” refers to any individual for whom diagnosis, treatment or therapy is desired. In some embodiments, the subject is an animal. In some embodiments, the subject is a mammal. In some embodiments, the subject is a human being.

[0283] The efficacy of a treatment can be determined by the skilled clinician. However, a treatment is considered an “effective treatment,” if any one or all of the signs or symptoms of a disease or disorder are altered in a beneficial manner (e.g., decreased by at least 10%), or other clinically accepted symptoms or markers of disease are improved or ameliorated. Efficacy can also be measured by failure of an individual to worsen as assessed by hospitalization or need for medical interventions (e.g., progression of the disease is halted or at least slowed). Methods of measuring these indicators are known to those of skill in the art. Treatment includes: (1) inhibiting the disease, e.g., arresting, or slowing the progression of symptoms; or (2) relieving the disease, e.g., causing regression of symptoms; and (3) preventing or reducing the likelihood of the development of symptoms.

[0284] Pharmaceutical compositions comprising the presently disclosed RGN polypeptides or polynucleotides encoding the same, the presently disclosed gRNAs or polynucleotides encoding the same, the presently disclosed deaminases or polynucleotides encoding the same, the presently disclosed fusion proteins, the presently disclosed systems (such as those comprising a fusion protein), or cells comprising any of the RGN polypeptides or RGN-encoding polynucleotides, gRNA or gRNA-encoding polynucleotides, fusion protein-encoding polynucleotides, or the systems, and a pharmaceutically acceptable carrier are provided.

[0285] As used herein, a “pharmaceutically acceptable carrier” refers to a material that does not cause significant irritation to an organism and does not abrogate the activity and properties of the active ingredient (e.g., a deaminase or fusion protein or nucleic acid molecule encoding the same). Carriers must be of sufficiently high purity and of sufficiently low toxicity to render them suitable for administration to a subject being treated. The carrier can be inert, or it can possess pharmaceutical benefits. In some embodiments, a pharmaceutically acceptable carrier comprises one or more compatible solid or liquid filler, diluents or encapsulating substances which are suitable for administration to a human or other vertebrate animal. In some embodiments, the pharmaceutical composition comprises a pharmaceutically acceptable carrier that is non-naturally occurring. In some embodiments, the pharmaceutically acceptable carrier and the active ingredient are not found together in nature and are thus, heterologous.

[0286] Pharmaceutical compositions used in the presently disclosed methods can be formulated with suitable carriers, excipients, and other agents that provide suitable transfer, delivery, tolerance, and the like. A multitude of appropriate formulations are known to those skilled in the art. See, e.g., Remington, The Science and Practice of Pharmacy (21st ed. 2005). Non-limiting examples include a sterile diluent such as water for injection, saline solution, fixed oils, polyethylene glycols, glycerine, propylene glycol or other synthetic solvents; antibacterial agents such as benzyl alcohol or methyl parabens; antioxidants such as ascorbic acid or sodium bisulfite; chelating agents such as ethylenediaminetetraacetic acid; buffers such as acetates, citrates or phosphates and agents for the adjustment of tonicity such as sodium chloride or dextrose. Administered intravenously, particular carriers are physiological saline or phosphate buffered saline (PBS). Pharmaceutical compositions for oral or parenteral use may be prepared into dosage forms in a unit dose suited to fit a dose of the active ingredients. Such dosage forms in a unit dose include, for example, tablets, pills, capsules, injections (ampoules), suppositories, etc. These compositions also may contain adjuvants including preservative agents, wetting agents, emulsifying agents, and dispersing agents. Prevention of the action of microorganisms may be ensured by various antibacterial and antifungal agents, for example, parabens, chlorobutanol, phenol, sorbic acid, and the like. It also may be desirable to include isotonic agents, for example, sugars, sodium chloride and the like. Prolonged absorption of the injectable pharmaceutical form may be brought about by the use of agents delaying absorption, for example, aluminum monostearate and gelatin.

[0287] In some embodiments wherein cells comprising or modified with the presently disclosed RGNs, gRNAs, deaminases, fusion proteins, systems (including those comprising fusion proteins) or polynucleotides encoding the same are administered to a subject, the cells are administered as a suspension with a pharmaceutically acceptable carrier. One of skill in the art will recognize that a pharmaceutically acceptable carrier to be used in a cell composition will not include buffers, compounds, cryopreservation agents, preservatives, or other agents in amounts that substantially interfere with the viability of the cells to be delivered to the subject. A formulation comprising cells can include e.g., osmotic buffers that permit cell membrane integrity to be maintained, and optionally, nutrients to maintain cell viability or enhance engraftment upon administration. Such formulations and suspensions are known to those of skill in the art and/or can be adapted for use with the cells described herein using routine experimentation.

[0288] A cell composition can also be emulsified or presented as a liposome composition, provided that the emulsification procedure does not adversely affect cell viability. The cells and any other active ingredient can be mixed with excipients that are pharmaceutically acceptable and compatible with the active ingredient, and in amounts suitable for use in the therapeutic methods described herein.

[0289] Additional agents included in a cell composition can include pharmaceutically acceptable salts of the components therein. Pharmaceutically acceptable salts include the acid addition salts (formed with the free amino groups of the polypeptide) that are formed with inorganic acids, such as, for example, hydrochloric or phosphoric acids, or such organic acids as acetic, tartaric, mandelic and the like. Salts formed with the free carboxyl groups can also be derived from inorganic bases, such as, for example, sodium, potassium, ammonium, calcium or ferric hydroxides, and such organic bases as isopropylamine, trimethylamine, 2-ethylamino ethanol, histidine, procaine and the like.

### Modifying Causal Mutations Using Base-Editing

[0290] An example of a genetically inherited disease which could be corrected using an approach that relies on an RGN-deaminase fusion protein of the invention is Niemann-Pick disease Type C. Niemann-Pick disease (NPC) is an autosomal recessive lysosomal storage disorder caused by mutations in the NPC1 or NPC2 gene (the sequence of the NPC1 gene is set forth as SEQ ID NO: 121), which results in abnormal accumulation of cholesterol and glycosphingolipids (GSLs). Patients with NPC typically develop symptoms between four and seven years of age. Major symptoms include liver and lung disease, hypotonia, dysphagia, delayed psychomotor development, cerebellar ataxia, progressive cognitive impairment, dementia, and other neurological dysfunctions. A common variant associated with juvenile neurologic disease onset is NM_000271.5(NPC1):c.3182T>C (p.Ile1061Thr) in exon 21, which is correctable with cytosine base editing. The present invention also discloses potential target sequences which guide the fusion proteins of the invention to target the causal mutations of various diseases, including the NM_000271.5(NPC1):c.3182T>C (p.I1061T) mutation in exon 21 known to cause Niemann-Pick disease type C.

### XII. Cells Comprising a Polynucleotide Genetic Modification

[0291] Provided herein are cells and organisms comprising a target nucleic acid molecule of interest that has been modified using a process mediated by a fusion protein, optionally with a gRNA, as described herein. In some embodiments, the fusion protein comprises a deaminase polypeptide comprising an amino acid sequence of any of SEQ ID NOs: 2, 4, and 6-12, or an active variant or fragment thereof. In some embodiments, the fusion protein comprises a cytosine deaminase comprising an amino acid sequence having at least 50%, at least 55%, at least 60%, at least 65%, at least 70%, at least 75%, at least 80%, at least 85%, at least 90%, at least 95%, at least 96%, at least 97%, at least 98%, or at least 99% identity to any of SEQ ID NOs: 2, 4, and 6-12. In some embodiments, the fusion protein comprises a deaminase and a DNA-binding polypeptide (e.g., an RNA-guided, DNA-binding polypeptide). In further embodiments, the fusion protein comprises a deaminase and an RGN or a variant thereof, such as for example APG07433.1 (SEQ ID NO: 74) or its nickase variant nAPG07433.1 (SEQ ID NO: 75). In some embodiments, the fusion protein comprises a deaminase and a Cas9 or a variant thereof, such as for example dCas9 or nickase Cas9. In some embodiments, the fusion protein comprises a nuclease-inactive or nickase variant of a Type II CRISPR-Cas polypeptide. In some embodiments, the fusion protein comprises a nuclease-inactive or nickase variant of a Type V CRISPR-Cas polypeptide. In some embodiments, the fusion protein comprises a nuclease-inactive or nickase variant of a Type VI CRISPR-Cas polypeptide.

[0292] The modified cells can be eukaryotic (e.g., mammalian, plant, insect, avian cell) or prokaryotic. Also provided are organelles and embryos comprising at least one nucleotide sequence that has been modified by a process utilizing a fusion protein as described herein. The genetically modified cells, organisms, organelles, and embryos can be heterozygous or homozygous for the modified nucleotide sequence. The mutation(s) introduced by the deaminase of the fusion protein can result in altered expression (up-regulation or down-regulation), inactivation, or the expression of an altered protein product or an integrated sequence. In those instances wherein the mutation(s) results in either the inactivation of a gene or the expression of a non-functional protein product, the genetically modified cell, organism, organelle, or embryo is referred to as a “knock out”. The knock out phenotype can be the result of a deletion mutation (i.e., deletion of at least one nucleotide), an insertion mutation (i.e., insertion of at least one nucleotide), or a nonsense mutation (i.e., substitution of at least one nucleotide such that a stop codon is introduced).

[0293] In some embodiments, the mutation(s) introduced by the deaminase of the fusion protein results in the production of a variant protein product. The expressed variant protein product can have at least one amino acid substitution and/or the addition or deletion of at least one amino acid. The variant protein product can exhibit modified characteristics or activities when compared to the wild-type protein, including but not limited to altered enzymatic activity or substrate specificity.

[0294] In some embodiments, the mutation(s) introduced by the deaminase of the fusion protein result in an altered expression pattern of a protein. As a non-limiting example, mutation(s) in the regulatory regions controlling the expression of a protein product can result in the overexpression or downregulation of the protein product or an altered tissue or temporal expression pattern.

[0295] The cells that have been modified can be grown into an organism, such as a plant, in accordance with conventional ways. See, for example, McCormick et al. (1986) Plant Cell Reports 5:81-84. These plants may then be grown, and either pollinated with the same modified strain or different strains, and the resulting hybrid having the genetic modification. The present invention provides genetically modified seed. Progeny, variants, and mutants of the regenerated plants are also included within the scope of the invention, provided that these parts comprise the genetic modification. Further provided is a processed plant product or byproduct that retains the genetic modification, including for example, soymeal.

[0296] The methods provided herein may be used for modification of any plant species, including, but not limited to, monocots and dicots. Examples of plants of interest include, but are not limited to, corn (maize), sorghum, wheat, sunflower, tomato, crucifers, peppers, potato, cotton, rice, soybean, sugarbeet, sugarcane, tobacco, barley, and oilseed rape, Brassica sp., alfalfa, rye, millet, safflower, peanuts, sweet potato, cassava, coffee, coconut, pineapple, citrus trees, cocoa, tea, banana, avocado, fig, guava, mango, olive, papaya, cashew, macadamia, almond, oats, vegetables, ornamentals, and conifers.

[0297] Vegetables include, but are not limited to, tomatoes, lettuce, green beans, lima beans, peas, and members of the genus Cucumis such as cucumber, cantaloupe, and musk melon. Ornamentals include, but are not limited to, azalea, hydrangea, hibiscus, roses, tulips, daffodils, petunias, carnation, poinsettia, and chrysanthemum. Preferably, plants of the present invention are crop plants (for example, maize, sorghum, wheat, sunflower, tomato, crucifers, peppers, potato, cotton, rice, soybean, sugarbeet, sugarcane, tobacco, barley, oilseed rape, etc.).

[0298] The methods provided herein can also be used to genetically modify any prokaryotic species, including but not limited to, archaea and bacteria (e.g., Bacillus sp., Klebsiella sp. Streptomyces sp., Rhizobium sp., Escherichia sp., Pseudomonas sp., Salmonella sp., Shigella sp., Vibrio sp., Yersinia sp., Mycoplasma sp., Agrobacterium, Lactobacillus sp.).

[0299] The methods provided herein can be used to genetically modify any eukaryotic species or cells therefrom, including but not limited to animals (e.g., mammals, insects, fish, birds, and reptiles), fungi, amoeba, algae, and yeast. In some embodiments, the cell that is modified by the presently disclosed methods include cells of hematopoietic origin, such as immune cells (i.e., a cell of the innate or adaptive immune system) including but not limited to B cells, T cells, natural killer (NK) cells, pluripotent stem cells, induced pluripotent stem cells, chimeric antigen receptor T (CAR-T) cells, monocytes, macrophages, and dendritic cells.

[0300] Cells that have been modified may be introduced into an organism. These cells could have originated from the same organism (e.g., person) in the case of autologous cellular transplants, wherein the cells are modified in an ex vivo approach. In some embodiments, the cells originated from another organism within the same species (e.g., another person) in the case of allogeneic cellular transplants.

### XIII. Kits

[0301] Some aspects of this disclosure provide kits comprising a deaminase of the invention. In certain embodiments, the disclosure provides kits comprising a fusion protein comprising a deaminase of the invention and a DNA-binding polypeptide (e.g., an RNA-guided, DNA-binding polypeptide, such as an RGN polypeptide, for example a nuclease-inactive or nickase RGN), and, optionally, a linker positioned between the DNA-binding polypeptide and the deaminase. In addition, in some embodiments, the kit comprises suitable reagents, buffers, and/or instructions for using the fusion protein, e.g., for in vitro or in vivo DNA or RNA editing. In some embodiments, the kit comprises instructions regarding the design and use of suitable gRNAs for targeted editing of a nucleic acid sequence.

[0302] The article “a” and “an” are used herein to refer to one or more than one (i.e., to at least one) of the grammatical object of the article. By way of example, “a polypeptide” means one or more polypeptides.

[0303] All publications and patent applications mentioned in the specification are indicative of the level of those skilled in the art to which this disclosure pertains. All publications and patent applications are herein incorporated by reference to the same extent as if each individual publication or patent application was specifically and individually indicated to be incorporated herein by reference.

[0304] Although the foregoing invention has been described in some detail by way of illustration and example for purposes of clarity of understanding, it will be obvious that certain changes and modifications may be practiced within the scope of the appended claims.

[0305] Non-limiting embodiments include:

[0306] 1. A polypeptide comprising an amino acid sequence selected from the group consisting of:
[0307] a) an amino acid sequence having at least 90% sequence identity to any one of SEQ ID NOs: 2 and 7-12; and
[0308] b) an amino acid sequence having at least 95% sequence identity to SEQ ID NO: 4 or 6; wherein said polypeptide has deaminase activity.

[0309] 2. An isolated polypeptide comprising an amino acid sequence selected from the group consisting of:
[0310] a) an amino acid sequence having at least 90% sequence identity to any one of SEQ ID NOs: 2 and 7-12; and
[0311] b) an amino acid sequence having at least 95% sequence identity to SEQ ID NO: 4 or 6; wherein said polypeptide has deaminase activity.

[0312] 3. The polypeptide of embodiment 1 or 2, comprising an amino acid sequence having at least 95% sequence identity to any one of SEQ ID NOs: 2 and 7-12.

[0313] 4. The polypeptide of embodiment 1 or 2, comprising an amino acid sequence having 100% sequence identity to any one of SEQ ID NOs: 2, 4, and 6-12.

[0314] 5. A nucleic acid molecule comprising a polynucleotide encoding a deaminase polypeptide, wherein the deaminase is encoded by a nucleotide sequence selected from the group consisting of:
[0315] a) a nucleotide sequence having at least 80% sequence identity to any one of SEQ ID NOs: 114-119;
[0316] b) a nucleotide sequence having at least 95% sequence identity to any one of SEQ ID NOs: 109, 111, and 113
[0317] c) a nucleotide sequence encoding an amino acid sequence having at least 90% sequence identity to any one of SEQ ID NOs: 2 and 7-12; and
[0318] d) a nucleotide sequence encoding an amino acid sequence having at least 95% sequence identity to SEQ ID NO: 4 or 6.

[0319] 6. An isolated nucleic acid molecule comprising a polynucleotide encoding a deaminase polypeptide, wherein the deaminase is encoded by a nucleotide sequence selected from the group consisting of:
[0320] a) a nucleotide sequence having at least 80% sequence identity to any one of SEQ ID NOs: 114-119;
[0321] b) a nucleotide sequence having at least 95% sequence identity to any one of SEQ ID NOs: 109, 111, and 113
[0322] c) a nucleotide sequence encoding an amino acid sequence having at least 90% sequence identity to any one of SEQ ID NOs: 2 and 7-12; and
[0323] d) a nucleotide sequence encoding an amino acid sequence having at least 95% sequence identity to SEQ ID NO: 4 or 6.

[0324] 7. The nucleic acid molecule of embodiment 5 or 6, wherein the deaminase is encoded by a nucleotide sequence that has at least 90% sequence identity to any one of SEQ ID NOs: 114-119.

[0325] 8. The nucleic acid molecule of embodiment 5 or 6, wherein the deaminase is encoded by a nucleotide sequence that has at least 95% sequence identity to any one of SEQ ID NOs: 114-119.

[0326] 9. The nucleic acid molecule of embodiment 5 or 6, wherein the deaminase is encoded by a nucleotide sequence that has 100% sequence identity to any one of SEQ ID NOs: 109, 111, and 113-119.

[0327] 10. The nucleic acid molecule of embodiment 5 or 6, wherein the deaminase polypeptide has an amino acid sequence having at least 95% sequence identity to any one of SEQ ID NOs: 2 and 7-12.

[0328] 11. The nucleic acid molecule of embodiment 5 or 6, wherein the deaminase polypeptide has an amino acid sequence having 100% sequence identity to any one of SEQ ID NOs: 2, 4, and 6-12.

[0329] 12. The nucleic acid molecule of any one of embodiments 5-11, wherein said nucleic acid molecule further comprises a heterologous promoter operably linked to said polynucleotide.

[0330] 13. A vector comprising said nucleic acid molecule of any one of embodiments 5-12.

[0331] 14. A cell comprising said nucleic acid molecule of any one of embodiments 5-12 or said vector of embodiment 13.

[0332] 15. The cell of embodiment 14, wherein the cell is a prokaryotic cell.

[0333] 16. The cell of embodiment 14, wherein the cell is a eukaryotic cell.

[0334] 17. The cell of embodiment 16, wherein the eukaryotic cell is a mammalian cell.

[0335] 18. The cell of embodiment 17, wherein the mammalian cell is a human cell.

[0336] 19. The cell of embodiment 18, wherein the human cell is an immune cell.

[0337] 20. The cell of embodiment 19, wherein the immune cell is a stem cell.

[0338] 21. The cell of embodiment 20, wherein the stem cell is an induced pluripotent stem cell.

[0339] 22. The cell of embodiment 16, wherein the eukaryotic cell is an insect or avian cell.

[0340] 23. The cell of embodiment 16, wherein the eukaryotic cell is a fungal cell.

[0341] 24. The cell of embodiment 16, wherein the eukaryotic cell is a plant cell.

[0342] 25. A plant comprising the cell of embodiment 24.

[0343] 26. A seed comprising the cell of embodiment 24.

[0344] 27. A pharmaceutical composition comprising a pharmaceutically acceptable carrier and the polypeptide of any one of embodiments 1-4, the nucleic acid molecule of any one of embodiments 5-12, the vector of embodiment 13, or the cell of any one of embodiments 14-24.

[0345] 28. The pharmaceutical composition of embodiment 27, wherein the pharmaceutically acceptable carrier is heterologous to said polypeptide or said nucleic acid molecule.

[0346] 29. The pharmaceutical composition of embodiment 27 or 28, wherein the pharmaceutically acceptable carrier is not naturally-occurring.

[0347] 30. A method for making a deaminase comprising culturing the cell of any one of embodiments 14-24 under conditions in which the deaminase is expressed.

[0348] 31. A method for making a deaminase comprising introducing into a cell the nucleic acid molecule of any of embodiments 5-12 or a vector of embodiment 13 and culturing the cell under conditions in which the deaminase is expressed.

[0349] 32. The method of embodiment 30 or 31, further comprising purifying said deaminase.

[0350] 33. A fusion protein comprising a DNA-binding polypeptide and a deaminase having an amino acid sequence selected from the group consisting of:
[0351] a) an amino acid sequence having at least 90% sequence identity to any one of SEQ ID NOs: 2 and 7-12; and
[0352] b) an amino acid sequence having at least 95% sequence identity to SEQ ID NO: 4 or 6.

[0353] 34. The fusion protein of embodiment 33, wherein said deaminase has at least 95% sequence identity to any one of SEQ ID NOs: 2 and 7-12.

[0354] 35. The fusion protein of embodiment 33, wherein said deaminase has 100% sequence identity to any one of SEQ ID NOs: 2, 4, and 6-12.

[0355] 36. The fusion protein of any one of embodiments 33-35, wherein the deaminase is a cytosine deaminase.

[0356] 37. The fusion protein of any one of embodiments 33-36, wherein the DNA-binding polypeptide is a meganuclease, a zinc finger fusion protein, or a TALEN; or a variant of a meganuclease, a zinc finger fusion protein, or a TALEN, wherein the nuclease activity has been reduced or inhibited.

[0357] 38. The fusion protein of any one of embodiments 33-36, wherein the DNA-binding polypeptide is an RNA-guided, DNA-binding polypeptide.

[0358] 39. The fusion protein of embodiment 38, wherein the RNA-guided, DNA-binding polypeptide is an RNA-guided nuclease (RGN) polypeptide.

[0359] 40. The fusion protein of embodiment 39, wherein the RGN is a Type II CRISPR-Cas polypeptide.

[0360] 41. The fusion protein of embodiment 39, wherein the RGN is a Type V CRISPR-Cas polypeptide.

[0361] 42. The fusion protein of any one of embodiments 39-41, wherein the RGN is an RGN nickase.

[0362] 43. The fusion protein of embodiment 42, wherein the RGN nickase has an inactive RuvC domain.

[0363] 44. The fusion protein of any one of embodiments 39-41, wherein the RGN is a nuclease-inactive RGN.

[0364] 45. The fusion protein of embodiment 39, wherein the RGN has an amino acid sequence having at least 90% sequence identity to any one of the RGN sequences in Table 1.

[0365] 46. The fusion protein of embodiment 39, wherein the RGN has an amino acid sequence having at least 95% sequence identity to any one of the RGN sequences in Table 1.

[0366] 47. The fusion protein of embodiment 39, wherein the RGN has an amino acid sequence of any one of the RGN sequences in Table 1.

[0367] 48. The fusion protein of embodiment 39, wherein the RGN has an amino acid sequence having at least 90% sequence identity to any one of SEQ ID NOs: 74, 82, 87, 106, and 107.

[0368] 49. The fusion protein of embodiment 39, wherein the RGN has an amino acid sequence having at least 95% sequence identity to any one of SEQ ID NOs: 74, 82, 87, 106, and 107.

[0369] 50. The fusion protein of embodiment 39, wherein the RGN has an amino acid sequence of any one of SEQ ID NOs: 74, 82, 87, 106, and 107.

[0370] 51. The fusion protein of embodiment 42, wherein the RGN nickase has an amino acid sequence having at least 90% sequence identity to any one of SEQ ID NOs: 75 and 88-98.

[0371] 52. The fusion protein of embodiment 42, wherein the RGN nickase has an amino acid sequence having at least 95% sequence identity to any one of SEQ ID NOs: 75 and 88-98.

[0372] 53. The fusion protein of embodiment 42, wherein the RGN nickase has an amino acid sequence having any one of SEQ ID NOs: 75 and 88-98.

[0373] 54. The fusion protein of any of embodiments 33-53, wherein the fusion protein further comprises at least one nuclear localization signal (NLS).

[0374] 55. The fusion protein of any one of embodiments 33-54, wherein the deaminase is fused to the amino terminus of the DNA-binding polypeptide.

[0375] 56. The fusion protein of any one of embodiments 33-54, wherein the deaminase is fused to the carboxyl terminus of the DNA-binding polypeptide.

[0376] 57. The fusion protein of any one of embodiments 33-56, wherein the fusion protein further comprises a linker sequence between said DNA-binding polypeptide and said deaminase.

[0377] 58. The fusion protein of embodiment 57, wherein said linker sequence has an amino acid sequence set forth as SEQ ID NO: 78 or 79.

[0378] 59. The fusion protein of any one of embodiments 33-58, wherein said fusion protein further comprises a uracil stabilizing protein (USP).

[0379] 60. The fusion protein of embodiment 59, wherein said USP has the sequence set forth as SEQ ID NO: 81.

[0380] 61. The fusion protein of embodiment 59 or 60, wherein said fusion protein further comprises a linker sequence between said USP and said deaminase or said DNA-binding polypeptide.

[0381] 62. The fusion protein of embodiment 61, wherein said linker sequence between said USP and said deaminase or said DNA-binding polypeptide has an amino acid sequence set forth as SEQ ID NO: 120.

[0382] 63. The fusion protein of embodiment 33, wherein said fusion protein has an amino acid sequence of any one of SEQ ID NOs: 67, 68, 146, and 147.

[0383] 64. A nucleic acid molecule comprising a polynucleotide encoding a fusion protein comprising a DNA-binding polypeptide and a deaminase, wherein the deaminase is encoded by a nucleotide sequence selected from the group consisting of:
[0384] a) a nucleotide sequence having at least 80% sequence identity to any one of SEQ ID NOs: 114-119;
[0385] b) a nucleotide sequence having at least 95% sequence identity to any one of SEQ ID NOs: 109, 111, and 113;
[0386] c) a nucleotide sequence encoding an amino acid sequence having at least 90% sequence identity to any one of SEQ ID NOs: 2 and 7-12; and
[0387] d) a nucleotide sequence encoding an amino acid sequence having at least 95% sequence identity to SEQ ID NO: 4 or 6.

[0388] 65. The nucleic acid molecule of embodiment 64, wherein said deaminase is encoded by a nucleotide sequence has at least 90% sequence identity to any one of SEQ ID NOs: 114-119.

[0389] 66. The nucleic acid molecule of embodiment 64, wherein said deaminase is encoded by a nucleotide sequence has at least 95% sequence identity to any one of SEQ ID NOs: 114-119.

[0390] 67. The nucleic acid molecule of embodiment 64, wherein said deaminase nucleotide sequence has 100% sequence identity to any one of SEQ ID NOs: 109, 111, and 113-119.

[0391] 68. The nucleic acid molecule of embodiment 64, wherein said deaminase nucleotide sequence encodes an amino acid sequence having at least 95% sequence identity to any one of SEQ ID NOs: 2 and 7-12.

[0392] 69. The nucleic acid molecule of embodiment 64, wherein said deaminase nucleotide sequence encodes an amino acid sequence having 100% sequence identity to any one of SEQ ID NOs: 2, 4, and 6-12.

[0393] 70. The nucleic acid molecule of any one of embodiments 64-69, wherein the deaminase is a cytosine deaminase.

[0394] 71. The nucleic acid molecule of any one of embodiments 64-70, wherein the DNA-binding polypeptide is a meganuclease, a zinc finger fusion protein, or a TALEN; or a variant of a meganuclease, a zinc finger fusion protein, or a TALEN, wherein the nuclease activity has been reduced or inhibited.

[0395] 72. The nucleic acid molecule of any one of embodiments 64-70, wherein the DNA-binding polypeptide is an RNA-guided, DNA-binding polypeptide.

[0396] 73. The nucleic acid molecule of embodiment 72, wherein the RNA-guided, DNA-binding polypeptide is an RNA-guided nuclease (RGN) polypeptide.

[0397] 74. The nucleic acid molecule of embodiment 73, wherein the RGN is a Type II CRISPR-Cas polypeptide.

[0398] 75. The nucleic acid molecule of embodiment 73, wherein the RGN is a Type V CRISPR-Cas polypeptide.

[0399] 76. The nucleic acid molecule of any one of embodiments 73-75, wherein the RGN is an RGN nickase.

[0400] 77. The nucleic acid molecule of embodiment 76, wherein said RGN nickase has an inactive RuvC domain.

[0401] 78. The nucleic acid molecule of any one of embodiments 73-75, wherein the RGN is a nuclease-inactive RGN.

[0402] 79. The nucleic acid molecule of embodiment 73, wherein the RGN has an amino acid sequence having at least 90% sequence identity to any one of the RGN sequences in Table 1.

[0403] 80. The nucleic acid molecule of embodiment 73, wherein the RGN has an amino acid sequence having at least 95% sequence identity to any one of the RGN sequences in Table 1.

[0404] 81. The nucleic acid molecule of embodiment 73, wherein the RGN has an amino acid sequence of any one of the RGN sequences in Table 1.

[0405] 82. The nucleic acid molecule of embodiment 73, wherein the RGN has an amino acid sequence having at least 90% sequence identity to any one of SEQ ID NOs: 74, 82, 87, 106, and 107.

[0406] 83. The nucleic acid molecule of embodiment 73, wherein the RGN has an amino acid sequence having at least 95% sequence identity to any one of SEQ ID NOs: 74, 82, 87, 106, and 107.

[0407] 84. The nucleic acid molecule of embodiment 73, wherein the RGN has an amino acid sequence of any one of SEQ ID NOs: 74, 82, 87, 106, and 107.

[0408] 85. The nucleic acid molecule of embodiment 76, wherein the RGN nickase has an amino acid sequence having at least 90% sequence identity to any one of SEQ ID NOs: 75 and 88-98.

[0409] 86. The nucleic acid molecule of embodiment 76, wherein the RGN nickase has an amino acid sequence having at least 95% sequence identity to any one of SEQ ID NOs: 75 and 88-98.

[0410] 87. The nucleic acid molecule of embodiment 76, wherein the RGN nickase has an amino acid sequence having any one of SEQ ID NOs: 75 and 88-98.

[0411] 88. The nucleic acid molecule of any of embodiments 64-87, wherein the polynucleotide encoding the fusion protein is operably linked at its 5′ end to a promoter.

[0412] 89. The nucleic acid molecule of any of embodiments 64-88, wherein the polynucleotide encoding the fusion protein is operably linked at its 3′ end to a terminator.

[0413] 90. The nucleic acid molecule of any of embodiments 64-89, wherein the fusion protein comprises one or more nuclear localization signals.

[0414] 91. The nucleic acid molecule of any of embodiments 64-90, wherein the fusion protein is codon optimized for expression in a eukaryotic cell.

[0415] 92. The nucleic acid molecule of any of embodiments 64-90, wherein the fusion protein is codon optimized for expression in a prokaryotic cell.

[0416] 93. The nucleic acid molecule of any one of embodiments 64-92, wherein the deaminase is fused to the amino terminus of the DNA-binding polypeptide.

[0417] 94. The nucleic acid molecule of any one of embodiments 64-92, wherein the deaminase is fused to the carboxyl terminus of the DNA-binding polypeptide.

[0418] 95. The nucleic acid molecule of any one of embodiments 64-94, wherein the fusion protein further comprises a linker sequence between said DNA-binding polypeptide and said deaminase.

[0419] 96. The nucleic acid molecule of embodiment 95, wherein said linker sequence has an amino acid sequence set forth as SEQ ID NO: 78 or 79.

[0420] 97. The nucleic acid molecule of any one of embodiments 64-96, wherein said fusion protein further comprises a uracil stabilizing protein (USP).

[0421] 98. The nucleic acid molecule of embodiment 97, wherein said USP has the sequence set forth as SEQ ID NO: 81.

[0422] 99. The nucleic acid molecule of embodiment 97 or 98, wherein said fusion protein further comprises a linker sequence between said USP and said deaminase or said DNA-binding polypeptide.

[0423] 100. The nucleic acid molecule of embodiment 99, wherein said linker sequence between said USP and said deaminase or said DNA-binding polypeptide has an amino acid sequence set forth as SEQ ID NO: 120.

[0424] 101. The nucleic acid molecule of embodiment 64, wherein said fusion protein has an amino acid sequence set forth as any one of SEQ ID NOs: 67, 68, 146, and 147.

[0425] 102. A vector comprising the nucleic acid molecule of any one of embodiments 64-101.

[0426] 103. The vector of embodiment 102, further comprising at least one nucleotide sequence encoding a guide RNA (gRNA) capable of hybridizing to a target sequence.

[0427] 104. The vector of embodiment 103, wherein the gRNA is a single guide RNA.

[0428] 105. The vector of embodiment 103, wherein the gRNA is a dual guide RNA.

[0429] 106. A cell comprising the fusion protein of any of embodiments 33-63.

[0430] 107. The cell of embodiment 106, wherein the cell further comprises a guide RNA (gRNA).

[0431] 108. The cell of embodiment 107, wherein the gRNA is a single guide RNA.

[0432] 109. The cell of embodiment 107, wherein the gRNA is a dual guide RNA.

[0433] 110. A cell comprising the nucleic acid molecule of any one of embodiments 64-101.

[0434] 111. A cell comprising the vector of any one of embodiments 102-105.

[0435] 112. The cell of any one of embodiments 106-111, wherein the cell is a prokaryotic cell.

[0436] 113. The cell of any one of embodiments 106-111, wherein the cell is a eukaryotic cell.

[0437] 114. The cell of embodiment 113, wherein the eukaryotic cell is a mammalian cell.

[0438] 115. The cell of embodiment 114, wherein the mammalian cell is a human cell.

[0439] 116. The cell of embodiment 115, wherein the human cell is an immune cell.

[0440] 117. The cell of embodiment 116, wherein the immune cell is a stem cell.

[0441] 118. The cell of embodiment 117, wherein the stem cell is an induced pluripotent stem cell.

[0442] 119. The cell of embodiment 113, wherein the eukaryotic cell is an insect or avian cell.

[0443] 120. The cell of embodiment 113, wherein the eukaryotic cell is a fungal cell.

[0444] 121. The cell of embodiment 113, wherein the eukaryotic cell is a plant cell.

[0445] 122. A plant comprising the cell of embodiment 121.

[0446] 123. A seed comprising the cell of embodiment 121.

[0447] 124. A pharmaceutical composition comprising a pharmaceutically acceptable carrier and the fusion protein of any one of embodiments 33-63, the nucleic acid molecule of any one of embodiments 64-101, the vector of any one of embodiments 102-105, or the cell of any one of embodiments 114-118.

[0448] 125. A method for making a fusion protein comprising culturing the cell of any one of embodiments 106-121 under conditions in which the fusion protein is expressed.

[0449] 126. A method for making a fusion protein comprising introducing into a cell the nucleic acid molecule of any of embodiments 64-101 or a vector of any one of embodiments 102-105 and culturing the cell under conditions in which the fusion protein is expressed.

[0450] 127. The method of embodiment 125 or 126, further comprising purifying said fusion protein.

[0451] 128. A method for making an RGN fusion ribonucleoprotein complex, comprising introducing into a cell the nucleic acid molecule of any one of embodiments 72-87 and a nucleic acid molecule comprising an expression cassette encoding a guide RNA (gRNA), or the vector of any of embodiments 103-105, and culturing the cell under conditions in which the fusion protein and the gRNA are expressed and form an RGN fusion ribonucleoprotein complex.

[0452] 129. The method of embodiment 128, further comprising purifying said RGN fusion ribonucleoprotein complex.

[0453] 130. A system for modifying a target DNA molecule comprising a target DNA sequence, said system comprising:
[0454] a) a fusion protein or a nucleotide sequence encoding said fusion protein, wherein said fusion protein comprises an RNA-guided nuclease polypeptide (RGN) and a deaminase, wherein the deaminase has an amino acid sequence selected from the group consisting of:
   [0455] i) an amino acid sequence having at least 90% sequence identity to any one of SEQ ID NOs: 2 and 7-12; and
   [0456] ii) an amino acid sequence having at least 95% sequence identity to SEQ ID NO: 4 or 6; and
[0457] b) one or more guide RNAs capable of hybridizing to said target DNA sequence or one or more nucleotide sequences encoding the one or more guide RNAs (gRNAs); and
[0458] wherein the one or more guide RNAs are capable of forming a complex with the fusion protein in order to direct said fusion protein to bind to said target DNA sequence and modify the target DNA molecule.

[0459] 131. The system of embodiment 130, wherein said deaminase has an amino acid sequence having at least 95% sequence identity to any one of SEQ ID NOs: 2 and 7-12.

[0460] 132. The system of embodiment 130, wherein said deaminase has an amino acid sequence having 100% sequence identity to any one of SEQ ID NOs: 2, 4, and 6-12.

[0461] 133. The system of any one of embodiments 130-132, wherein at least one of said nucleotide sequence encoding the one or more guide RNAs and said nucleotide sequence encoding the fusion protein is operably linked to a promoter.

[0462] 134. The system of any one of embodiments 130-133, wherein the target DNA sequence is a eukaryotic target DNA sequence.

[0463] 135. The system of any one of embodiments 130-134, wherein the target DNA sequence is located adjacent to a protospacer adjacent motif (PAM) that is recognized by the RGN.

[0464] 136. The system of any one of embodiments 130-135, wherein the target DNA molecule is within a cell.

[0465] 137. The system of embodiment 136, wherein the cell is a eukaryotic cell.

[0466] 138. The system of embodiment 137, wherein the eukaryotic cell is a plant cell.

[0467] 139. The system of embodiment 137, wherein the eukaryotic cell is a mammalian cell.

[0468] 140. The system of embodiment 139, wherein the mammalian cell is a human cell.

[0469] 141. The system of embodiment 140, wherein the human cell is an immune cell.

[0470] 142. The system of embodiment 141, wherein the immune cell is a stem cell.

[0471] 143. The system of embodiment 142, wherein the stem cell is an induced pluripotent stem cell.

[0472] 144. The system of embodiment 137, wherein the eukaryotic cell is an insect cell.

[0473] 145. The system of embodiment 136, wherein the cell is a prokaryotic cell.

[0474] 146. The system of any one of embodiments 130-145, wherein the RGN of the fusion protein is a Type II CRISPR-Cas polypeptide.

[0475] 147. The system of any one of embodiments 130-145, wherein the RGN of the fusion protein is a Type V CRISPR-Cas polypeptide.

[0476] 148. The system of any one of embodiments 130-145, wherein the RGN of the fusion protein has an amino acid sequence having at least 90% sequence identity to any one of the RGN sequences in Table 1.

[0477] 149. The system of any one of embodiments 130-145, wherein the RGN of the fusion protein has an amino acid sequence having at least 95% sequence identity to any one of the RGN sequences in Table 1.

[0478] 150. The system of any one of embodiments 130-145, wherein the RGN of the fusion protein has an amino acid sequence of any one of the RGN sequences in Table 1.

[0479] 151. The system of any one of embodiments 130-145, wherein the RGN of the fusion protein has an amino acid sequence having at least 90% sequence identity to any one of SEQ ID NOs: 74, 82, 87, 106, and 107.

[0480] 152. The system of any one of embodiments 130-145, wherein the RGN of the fusion protein has an amino acid sequence having at least 95% sequence identity to any one of SEQ ID NOs: 74, 82, 87, 106, and 107.

[0481] 153. The system of any one of embodiments 130-145, wherein the RGN of the fusion protein has an amino acid sequence of any one of SEQ ID NOs: 74, 82, 87, 106, and 107.

[0482] 154. The system of any one of embodiments 130-145, wherein the RGN of the fusion protein is an RGN nickase.

[0483] 155. The system of embodiment 154, wherein the RGN nickase has an inactive RuvC domain.

[0484] 156. The system of embodiment 154 or 155, wherein the RGN nickase has an amino acid sequence having at least 90% sequence identity to any one of SEQ ID NOs: 75 and 88-98.

[0485] 157. The system of embodiment 154 or 155, wherein the RGN nickase has an amino acid sequence having at least 95% sequence identity to any one of SEQ ID NOs: 75 and 88-98.

[0486] 158. The system of embodiment 154 or 155, wherein the RGN nickase is any one of SEQ ID NOs: 75 and 88-98.

[0487] 159. The system of any one of embodiments 130-145, wherein the RGN of the fusion protein is a nuclease-inactive RGN.

[0488] 160. The system of any of embodiments 130-159, wherein the fusion protein comprises one or more nuclear localization signals.

[0489] 161. The system of any one of embodiments 130-160, wherein the deaminase is fused to the amino terminus of the DNA-binding polypeptide.

[0490] 162. The system of any one of embodiments 130-160, wherein the deaminase is fused to the carboxyl terminus of the DNA-binding polypeptide.

[0491] 163. The system of any one of embodiments 130-162, wherein the fusion protein further comprises a linker sequence between said DNA-binding polypeptide and said deaminase.

[0492] 164. The system of embodiment 163, wherein said linker sequence has an amino acid sequence set forth as SEQ ID NO: 78 or 79.

[0493] 165. The system of any one of embodiments 130-164, wherein said fusion protein further comprises a uracil stabilizing protein (USP).

[0494] 166. The system of embodiment 165, wherein said USP has the sequence set forth as SEQ ID NO: 81.

[0495] 167. The system of embodiment 165 or 166, wherein said fusion protein further comprises a linker sequence between said USP and said deaminase or said DNA-binding polypeptide.

[0496] 168. The system of embodiment 167, wherein said linker sequence between said USP and said deaminase or said DNA-binding polypeptide has an amino acid sequence set forth as SEQ ID NO: 120.

[0497] 169. The system of embodiment 130, wherein the fusion protein has an amino acid sequence set forth as any one of SEQ ID NOs: 67, 68, 146, and 147.

[0498] 170. The system of any one of embodiments 130-169, wherein the fusion protein is codon optimized for expression in a eukaryotic cell.

[0499] 171. The system of any of embodiments 130-170, wherein the one or more nucleotide sequences encoding the one or more guide RNAs and the nucleotide sequence encoding a fusion protein are located on one vector.

[0500] 172. A ribonucleoprotein complex comprising said at least one guide RNA and said fusion protein of the system of any one of embodiments 130-171.

[0501] 173. A cell comprising the system of any one of embodiments 130-171 or the ribonucleoprotein complex of embodiment 172.

[0502] 174. The cell of embodiment 173, wherein the cell is a prokaryotic cell.

[0503] 175. The cell of embodiment 173, wherein the cell is a eukaryotic cell.

[0504] 176. The cell of embodiment 175, wherein the eukaryotic cell is a mammalian cell.

[0505] 177. The cell of embodiment 176, wherein the mammalian cell is a human cell.

[0506] 178. The cell of embodiment 177, wherein the human cell is an immune cell.

[0507] 179. The cell of embodiment 178, wherein the immune cell is a stem cell.

[0508] 180. The cell of embodiment 179, wherein the stem cell is an induced pluripotent stem cell.

[0509] 181. The cell of embodiment 175, wherein the eukaryotic cell is an insect or avian cell.

[0510] 182. The cell of embodiment 175, wherein the eukaryotic cell is a fungal cell.

[0511] 183. The cell of embodiment 175, wherein the eukaryotic cell is a plant cell.

[0512] 184. A plant comprising the cell of embodiment 183.

[0513] 185. A seed comprising the cell of embodiment 183.

[0514] 186. A pharmaceutical composition comprising a pharmaceutically acceptable carrier and the system of any one of embodiments 130-171, the ribonucleoprotein complex of embodiment 172, or the cell of any one of embodiments 175-180.

[0515] 187. A method for modifying a target DNA molecule comprising a target DNA sequence, said method comprising delivering a system according to any one of embodiments 130-171 or a ribonucleoprotein complex of claim 172 to said target DNA molecule or a cell comprising the target DNA molecule.

[0516] 188. The method of embodiment 187, wherein said modified target DNA molecule comprises a C>N mutation of at least one nucleotide within the target DNA molecule, wherein N is A, G, or T.

[0517] 189. The method of embodiment 188, wherein said modified target DNA molecule comprises an C>T mutation of at least one nucleotide within the target DNA molecule.

[0518] 190. The method of embodiment 188, wherein said modified target DNA molecule comprises an C>G mutation of at least one nucleotide within the target DNA molecule.

[0519] 191. A method for modifying a target DNA molecule comprising a target sequence, said method comprising:
[0520] a) assembling an RGN-deaminase ribonucleotide complex in vitro by combining:
   [0521] i) one or more guide RNAs capable of hybridizing to the target DNA sequence; and
   [0522] ii) a fusion protein comprising an RNA-guided nuclease polypeptide (RGN), and at least one deaminase, wherein the deaminase has an amino acid sequence selected from the group consisting of:
      [0523] I) an amino acid sequence having at least 90% sequence identity to any one of SEQ ID NOs: 2 and 7-12; and
      [0524] II) an amino acid sequence having at least 95% sequence identity to SEQ ID NO: 4 or 6;
[0525] under conditions suitable for formation of the RGN-deaminase ribonucleotide complex; and
[0526] b) contacting said target DNA molecule or a cell comprising said target DNA molecule with the in vitro-assembled RGN-deaminase ribonucleotide complex;
[0527] wherein the one or more guide RNAs hybridize to the target DNA sequence, thereby directing said fusion protein to bind to said target DNA sequence and modification of the target DNA molecule occurs.

[0528] 192. The method of embodiment 191, wherein said deaminase has an amino acid sequence having at least 95% sequence identity to any one of SEQ ID NOs: 2 and 7-12.

[0529] 193. The method of embodiment 191, wherein said deaminase has an amino acid sequence having 100% sequence identity to any one of SEQ ID NOs: 2, 4, and 6-12.

[0530] 194. The method of any one of embodiments 191-193, wherein said modified target DNA molecule comprises a C>N mutation of at least one nucleotide within the target DNA molecule, wherein N is A, G, or T.

[0531] 195. The method of embodiment 194, wherein said modified target DNA molecule comprises a C>T mutation of at least one nucleotide within the target DNA molecule.

[0532] 196. The method of embodiment 194, wherein said modified target DNA molecule comprises a C>G mutation of at least one nucleotide within the target DNA molecule.

[0533] 197. The method of any one of embodiments 191-196, wherein the RGN of the fusion protein is a Type II CRISPR-Cas polypeptide.

[0534] 198. The method of any of embodiments 191-196, wherein the RGN of the fusion protein is a Type V CRISPR-Cas polypeptide.

[0535] 199. The method of any one of embodiments 191-198, wherein the RGN of the fusion protein has an amino acid sequence having at least 90% sequence identity to any one of the RGN sequences in Table 1.

[0536] 200. The method of any one of embodiments 191-198, wherein the RGN of the fusion protein has an amino acid sequence having at least 95% sequence identity to any one of the RGN sequences in Table 1.

[0537] 201. The method of any one of embodiments 191-198, wherein the RGN of the fusion protein has an amino acid sequence of any one of the RGN sequences in Table 1.

[0538] 202. The method of any one of embodiments 191-198, wherein the RGN of the fusion protein has an amino acid sequence having at least 90% sequence identity to any one of SEQ ID NOs: 74, 82, 87, 106, and 107.

[0539] 203. The method of any one of embodiments 191-198, wherein the RGN of the fusion protein has an amino acid sequence having at least 95% sequence identity to any one of SEQ ID NOs: 74, 82, 87, 106, and 107.

[0540] 204. The method of any one of embodiments 191-198, wherein the RGN of the fusion protein has an amino acid sequence of any one of SEQ ID NOs: 74, 82, 87, 106, and 107.

[0541] 205. The method of any of embodiments 191-198, wherein the RGN of the fusion protein is an RGN nickase.

[0542] 206. The method of embodiment 205, wherein said RGN nickase has an inactive RuvC domain.

[0543] 207. The method of embodiment 205 or 206, wherein said RGN nickase has an amino acid sequence having at least 90% sequence identity to any one of SEQ ID NOs: 75 and 88-98.

[0544] 208. The method of embodiment 205 or 206, wherein said RGN nickase has an amino acid sequence having at least 95% sequence identity to any one of SEQ ID NOs: 75 and 88-98.

[0545] 209. The method of embodiment 205 or 206, wherein the RGN nickase is any one of SEQ ID NOs: 75 and 88-98.

[0546] 210. The method of any one of embodiments 191-198, wherein the RGN of the fusion protein is a nuclease-inactive RGN.

[0547] 211. The method of any of embodiments 191-210, wherein the fusion protein comprises one or more nuclear localization signals.

[0548] 212. The method of any one of embodiments 191-211, wherein the deaminase is fused to the amino terminus of the DNA-binding polypeptide.

[0549] 213. The method of any one of embodiments 191-211, wherein the deaminase is fused to the carboxyl terminus of the DNA-binding polypeptide.

[0550] 214. The method of any one of embodiments 191-213, wherein the fusion protein further comprises a linker sequence between said DNA-binding polypeptide and said deaminase.

[0551] 215. The method of embodiment 214, wherein said linker sequence has an amino acid sequence set forth as SEQ ID NO: 78 or 79.

[0552] 216. The method of any one of embodiments 191-215, wherein said fusion protein further comprises a uracil stabilizing protein (USP).

[0553] 217. The method of embodiment 216, wherein said USP has the sequence set forth as SEQ ID NO: 81.

[0554] 218. The method of embodiment 216 or 217, wherein said fusion protein further comprises a linker sequence between said USP and said deaminase or said DNA-binding polypeptide.

[0555] 219. The method of embodiment 218, wherein said linker sequence between said USP and said deaminase or said DNA-binding polypeptide has an amino acid sequence set forth as SEQ ID NO: 120.

[0556] 220. The method of embodiment 191, wherein said fusion protein has an amino acid sequence set forth as any one of SEQ ID NOs: 67, 68, 146, and 147.

[0557] 221. The method of any one of embodiments 191-220, wherein said target DNA sequence is a eukaryotic target DNA sequence.

[0558] 222. The method of any of embodiments 191-221, wherein said target DNA sequence is located adjacent to a protospacer adjacent motif (PAM).

[0559] 223. The method of any of embodiments 191-222, wherein the target DNA molecule is within a cell.

[0560] 224. The method of embodiment 223, wherein the cell is a eukaryotic cell.

[0561] 225. The method of embodiment 224, wherein the eukaryotic cell is a plant cell.

[0562] 226. The method of embodiment 224, wherein the eukaryotic cell is a mammalian cell.

[0563] 227. The method of embodiment 226, wherein the mammalian cell is a human cell.

[0564] 228. The method of embodiment 227, wherein the human cell is an immune cell.

[0565] 229. The method of embodiment 228, wherein the immune cell is a stem cell.

[0566] 230. The method of embodiment 229, wherein the stem cell is an induced pluripotent stem cell.

[0567] 231. The method of embodiment 224, wherein the eukaryotic cell is an insect cell.

[0568] 232. The method of embodiment 223, wherein the cell is a prokaryotic cell.

[0569] 233. The method of any one of embodiments 223-232, further comprising selecting a cell comprising said modified DNA molecule.

[0570] 234. A cell comprising a modified target DNA sequence according to the method of embodiment

[0571] 233.

[0572] 235. The cell of embodiment 234, wherein the cell is a eukaryotic cell.

[0573] 236. The cell of embodiment 235, wherein the eukaryotic cell is a plant cell.

[0574] 237. A plant comprising the cell of embodiment 236.

[0575] 238. A seed comprising the cell of embodiment 236.

[0576] 239. The cell of embodiment 235, wherein the eukaryotic cell is a mammalian cell.

[0577] 240. The cell of embodiment 239, wherein the mammalian cell is a human cell.

[0578] 241. The cell of embodiment 240, wherein the human cell is an immune cell.

[0579] 242. The cell of embodiment 241, wherein the immune cell is a stem cell.

[0580] 243. The cell of embodiment 242, wherein the stem cell is an induced pluripotent stem cell.

[0581] 244. The cell of embodiment 235, wherein the eukaryotic cell is an insect cell.

[0582] 245. The cell of embodiment 234, wherein the cell is a prokaryotic cell.

[0583] 246. A pharmaceutical composition comprising the cell of any one of embodiments 239-243, and a pharmaceutically acceptable carrier.

[0584] 247. A method for producing a genetically modified cell with a correction in a causal mutation for a genetically inherited disease, the method comprising introducing into the cell:
[0585] a) a fusion protein or a polynucleotide encoding said fusion protein, wherein said fusion protein comprises an RNA-guided nuclease polypeptide (RGN) and a deaminase, wherein the deaminase has an amino acid sequence selected from the group consisting of:
   [0586] i) an amino acid sequence having at least 90% sequence identity to any one of SEQ ID NOs: 2 and 7-12; and
   [0587] ii) an amino acid sequence having at least 95% sequence identity to SEQ ID NO: 4 or 6;

[0588] and
[0589] b) one or more guide RNAs (gRNA) capable of hybridizing to a target DNA sequence, or a polynucleotide encoding said gRNA;
[0590] whereby the fusion protein and gRNA target to the genomic location of the causal mutation and modify the genomic sequence to remove the causal mutation.

[0591] 248. The method of embodiment 247, wherein said polynucleotide encoding the fusion protein is operably linked to a promoter active in said cell.

[0592] 249. The method of embodiment 247 or 248, wherein said polynucleotide encoding the gRNA is operably linked to a promoter active in said cell.

[0593] 250. The method of any one of embodiments 247-249, wherein said deaminase has an amino acid sequence having at least 95% sequence identity to any one of SEQ ID NOs: 2 and 7-12.

[0594] 251. The method of any one of embodiments 247-249, wherein said deaminase has an amino acid sequence having 100% sequence identity to any one of SEQ ID NOs: 2, 4, and 6-12.

[0595] 252. The method of any one of embodiments 247-251, wherein the RGN of the fusion protein is a Type II CRISPR-Cas polypeptide.

[0596] 253. The method of any of embodiments 247-251, wherein the RGN of the fusion protein is a Type V CRISPR-Cas polypeptide.

[0597] 254. The method of any one of embodiments 247-253, wherein the RGN of the fusion protein has an amino acid sequence having at least 90% sequence identity to any one of the RGN sequences in Table 1.

[0598] 255. The method of any of embodiments 247-253, wherein the RGN of the fusion protein has an amino acid sequence having at least 95% sequence identity to any one of the RGN sequences in Table 1.

[0599] 256. The method of any one of embodiments 247-253, wherein the RGN of the fusion protein has an amino acid sequence of any one of the RGN sequences in Table 1.

[0600] 257. The method of any of embodiments 247-253, wherein the RGN of the fusion protein is an RGN nickase.

[0601] 258. The method of embodiment 257, wherein said RGN nickase has an inactive RuvC domain.

[0602] 259. The method of embodiment 257 or 258, wherein the RGN nickase has an amino acid sequence having at least 90% sequence identity to any one of SEQ ID NOs: 75 and 88-98.

[0603] 260. The method of embodiment 257 or 258, wherein the RGN nickase has an amino acid sequence having at least 95% sequence identity to any one of SEQ ID NOs: 75 and 88-98.

[0604] 261. The method of embodiment 257 or 258, wherein the RGN nickase is any one of SEQ ID NOs: 75 and 88-98.

[0605] 262. The method of any one of embodiments 247-253, wherein the RGN of the fusion protein is a nuclease-inactive RGN.

[0606] 263. The method of any of embodiments 247-262, wherein the fusion protein comprises one or more nuclear localization signals.

[0607] 264. The method of any one of embodiments 247-263, wherein the deaminase is fused to the amino terminus of the DNA-binding polypeptide.

[0608] 265. The method of any one of embodiments 247-263, wherein the deaminase is fused to the carboxyl terminus of the DNA-binding polypeptide.

[0609] 266. The method of any one of embodiments 247-265, wherein the fusion protein further comprises a linker sequence between said DNA-binding polypeptide and said deaminase.

[0610] 267. The method of embodiment 266, wherein said linker sequence has an amino acid sequence set forth as SEQ ID NO: 78 or 79.

[0611] 268. The method of any one of embodiments 247-267, wherein said fusion protein further comprises a uracil stabilizing protein (USP).

[0612] 269. The method of embodiment 268, wherein said USP has the sequence set forth as SEQ ID NO: 81.

[0613] 270. The method of embodiment 268 or 269, wherein said fusion protein further comprises a linker sequence between said USP and said deaminase or said DNA-binding polypeptide.

[0614] 271. The method of embodiment 270, wherein said linker sequence between said USP and said deaminase or said DNA-binding polypeptide has an amino acid sequence set forth as SEQ ID NO: 120.

[0615] 272. The method of any one of embodiments 247-249, wherein said fusion protein has an amino acid sequence set forth as any one of SEQ ID NOs: 67, 68, 146, and 147.

[0616] 273. The method of any one of embodiments 247-272, wherein the genome modification comprises introducing a C>T mutation of at least one nucleotide within the target DNA sequence.

[0617] 274. The method of any one of embodiments 247-272, wherein the genome modification comprises introducing a C>G mutation of at least one nucleotide within the target DNA sequence.

[0618] 275. The method of any of embodiments 247-274, wherein the cell is an animal cell.

[0619] 276. The method of embodiment 275, wherein the animal cell is a mammalian cell.

[0620] 277. The method of embodiment 276, wherein the cell is derived from a dog, cat, mouse, rat, rabbit, horse, sheep, goat, cow, pig, or human.

[0621] 278. The method of any one of embodiments 247-277, wherein the correction of the causal mutation comprises correcting a nonsense mutation.

[0622] 279. The method of any one of embodiments 247-278, wherein the genetically inherited disease is a disease listed in Table 23.

[0623] 280. The method of embodiment 279, wherein the gRNA further comprises a spacer sequence that targets any one of SEQ ID NOs: 122-144, or the complement thereof.

[0624] 281. A composition comprising:
[0625] a) a fusion protein comprising a DNA-binding polypeptide and a cytosine deaminase, or a nucleic acid molecule encoding the fusion protein; and
[0626] b) a second cytosine deaminase or a nucleic acid molecule encoding the second deaminase, wherein the second deaminase has an amino acid sequence selected from the group consisting of:
   [0627] i) an amino acid sequence having at least 90% sequence identity to any one of SEQ ID NOs: 2 and 7-12; and
   [0628] ii) an amino acid sequence having at least 95% sequence identity to SEQ ID NO: 4 or 6.

[0629] 282. The composition of embodiment 281, wherein said second cytosine deaminase has at least 95% sequence identity to any one of SEQ ID NOs: 2 and 7-12.

283. The composition of embodiment 281, wherein said second cytosine deaminase has 100% sequence identity to any one of SEQ ID NOs: 2, 4, and 6-12.

[0630] 284. The composition of any one of embodiments 281-283, wherein the first cytosine deaminase has an amino acid sequence selected from the group consisting of:
[0631] a) an amino acid sequence having at least 90% sequence identity to any one of SEQ ID NOs: 2 and 7-12; and
[0632] b) an amino acid sequence having at least 95% sequence identity to SEQ ID NO: 4 or 6.

[0633] 285. The composition of any one of embodiments 281-284, wherein the first cytosine deaminase has at least 95% sequence identity to any one of SEQ ID NOs: 2 and 7-12.

[0634] 286. The composition of any one of embodiments 281-284, wherein the first cytosine deaminase has 100% sequence identity to any one of SEQ ID NOs: 2, 4, and 6-12.

[0635] 287. The composition of any one of embodiments 281-286, wherein the DNA-binding polypeptide is a meganuclease, a zinc finger fusion protein, or a TALEN; or a variant of a meganuclease, a zinc finger fusion protein, or a TALEN, wherein the nuclease activity has been reduced or inhibited.

[0636] 288. The composition of any one of embodiments 281-286, wherein the DNA-binding polypeptide is an RNA-guided, DNA-binding polypeptide.

[0637] 289. The composition of embodiment 288, wherein the RNA-guided, DNA-binding polypeptide is an RNA-guided nuclease (RGN) polypeptide.

[0638] 290. The composition of embodiment 289, wherein the RGN is an RGN nickase.

[0639] 291. The composition of embodiment 289, wherein the RGN is a nuclease-inactive RGN.

[0640] 292. A vector comprising a nucleic acid molecule encoding a fusion protein and a nucleic acid molecule encoding a second cytosine deaminase, wherein said fusion protein comprises a DNA-binding polypeptide and a first cytosine deaminase, and wherein said second cytosine deaminase has an amino acid sequence selected from the group consisting of:
[0641] a) an amino acid sequence having at least 90% sequence identity to any one of SEQ ID NOs: 2 and 7-12; and
[0642] b) an amino acid sequence having at least 95% sequence identity to SEQ ID NO: 4 or 6.

[0643] 293. The vector of embodiment 292, wherein said second cytosine deaminase has at least 95% sequence identity to any one of SEQ ID NOs: 2 and 7-12.

[0644] 294. The vector of embodiment 292, wherein said second cytosine deaminase has 100% sequence identity to any one of SEQ ID NOs: 2, 4, and 6-12.

[0645] 295. The vector of any one of embodiments 292-294, wherein the first cytosine deaminase has an amino acid sequence selected from the group consisting of:
[0646] a) an amino acid sequence having at least 90% sequence identity to any one of SEQ ID NOs: 2 and 7-12; and
[0647] b) an amino acid sequence having at least 95% sequence identity to SEQ ID NO: 4 or 6.

[0648] 296. The vector of any one of embodiments 292-294, wherein the first cytosine deaminase has at least 95% sequence identity to any one of SEQ ID NOs: 2 and 7-12.

[0649] 297. The vector of any one of embodiments 292-294, wherein the first cytosine deaminase has 100% sequence identity to any one of SEQ ID NOs: 2, 4, and 6-12.

[0650] 298. The vector of any one of embodiments 292-297, wherein the DNA-binding polypeptide is a meganuclease, a zinc finger fusion protein, or a TALEN; or a variant of a meganuclease, a zinc finger fusion protein, or a TALEN, wherein the nuclease activity has been reduced or inhibited.

[0651] 299. The vector of any one of embodiments 292-297, wherein the DNA-binding polypeptide is an RNA-guided, DNA-binding polypeptide.

[0652] 300. The vector of embodiment 299, wherein the RNA-guided, DNA-binding polypeptide is an RNA-guided nuclease (RGN) polypeptide.

[0653] 301. The vector of embodiment 300, wherein the RGN is an RGN nickase.

[0654] 302. The vector of embodiment 300, wherein the RGN is a nuclease-inactive RGN.

[0655] 303. A cell comprising the vector of any one of embodiments 292-302.

[0656] 304. A cell comprising:
[0657] a) a fusion protein comprising a DNA-binding polypeptide and a first cytosine deaminase; or a nucleic acid molecule encoding the fusion protein; and
[0658] b) a second cytosine deaminase or a nucleic acid molecule encoding the second cytosine deaminase, wherein the second cytosine deaminase has an amino acid sequence selected from the group consisting of:
   [0659] i) an amino acid sequence having at least 90% sequence identity to any one of SEQ ID NOs: 2 and 7-12; and
   [0660] ii) an amino acid sequence having at least 95% sequence identity to SEQ ID NO: 4 or 6.
[0661] 305. The cell of embodiment 304, wherein said second cytosine deaminase has at least 95% sequence identity to any one of SEQ ID NOs: 2 and 7-12.
[0662] 306. The cell of embodiment 304, wherein said second cytosine deaminase has 100% sequence identity to any one of SEQ ID NOs: 2, 4, and 6-12.
[0663] 307. The cell of any one of embodiments 304-306, wherein the first cytosine deaminase has an amino acid sequence selected from the group consisting of:
[0664] a) an amino acid sequence having at least 90% sequence identity to any one of SEQ ID NOs: 2 and 7-12; and
[0665] b) an amino acid sequence having at least 95% sequence identity to SEQ ID NO: 4 or 6.

[0666] 308. The cell of any one of embodiments 304-306, wherein the first cytosine deaminase has at least 95% sequence identity to any one of SEQ ID NOs: 2 and 7-12.

[0667] 309. The cell of any one of embodiments 304-306, wherein the first cytosine deaminase has 100% sequence identity to any one of SEQ ID NOs: 2, 4, and 6-12.

[0668] 310. The cell of any one of embodiments 304-309, wherein the DNA-binding polypeptide is a meganuclease, a zinc finger fusion protein, or a TALEN; or a variant of a meganuclease, a zinc finger fusion protein, or a TALEN, wherein the nuclease activity has been reduced or inhibited.

[0669] 311. The cell of any one of embodiments 304-309, wherein the DNA-binding polypeptide is an RNA-guided, DNA-binding polypeptide.

[0670] 312. The cell of embodiment 311, wherein the RNA-guided, DNA-binding polypeptide is an RNA-guided nuclease (RGN) polypeptide.

[0671] 313. The cell of embodiment 312, wherein the RGN is an RGN nickase.

[0672] 314. The cell of embodiment 312, wherein the RGN is a nuclease-inactive RGN.

[0673] 315. A pharmaceutical composition comprising a pharmaceutically acceptable carrier and the composition of any one of embodiments 281-291, the vector of any one of embodiments 292-302, or the cell of any one of embodiments 303-314.

[0674] 316. A method for treating a disease, said method comprising administering to a subject in need thereof the fusion protein of any one of embodiments 33-63, the nucleic acid molecule of any one of embodiments 64-101, the vector of any one of embodiments 102-105 and 292-302, the cell of any one of embodiments 113-118, 239-243, and 303-314, the system of any one of embodiments 130-171, the ribonucleoprotein complex of embodiment 172, the composition of any one of embodiments 281-291, or the pharmaceutical composition of any one of embodiments 124, 186, 246, and 315.

[0675] 317. The method of embodiment 316, wherein said disease is associated with a causal mutation and said pharmaceutical composition corrects said causal mutation.

[0676] 318. The method of embodiment 316 or 317, wherein said disease is a disease a disease listed in Table 23.

[0677] 319. Use of the fusion protein of any one of embodiments 33-63, the nucleic acid molecule of any one of embodiments 64-101, the vector of any one of embodiments 102-105 and 292-302, the cell of any one of embodiments 113-118, 239-243, and 303-314, the system of any one of embodiments 130-171, the ribonucleoprotein complex of embodiment 172, or the composition of any one of embodiments 281-291 for the treatment of a disease in a subject.

[0678] 320. The use of embodiment 319, wherein said disease is associated with a causal mutation and said treating comprises correcting said causal mutation.

[0679] 321. The use of embodiment 319 or 320, wherein said disease is a disease listed in Table 23.

[0680] 322. Use of the fusion protein of any one of embodiments 33-63, the nucleic acid molecule of any one of embodiments 64-101, the vector of any one of embodiments 102-105 and 292-302, the cell of any one of embodiments 113-118, 239-243, and 303-314, the system of any one of embodiments 130-171, the ribonucleoprotein complex of embodiment 172, or the composition of any one of embodiments 281-291 for the manufacture of a medicament useful for treating a disease.

[0681] 323. The use of embodiment 322, wherein said disease is associated with a causal mutation and an effective amount of said medicament corrects said causal mutation.

[0682] 324. The use of embodiment 322 or 323, wherein said disease is a disease listed in Table 23.

[0683] The following examples are offered by way of illustration and not by way of limitation.

### EXPERIMENTAL

### Example 1: Demonstration of C Base Editing in Mammalian Cells

[0684] Deaminases set forth as SEQ ID NOs: 1, 3, and 5 were truncated from both termini and the truncated deaminases are set forth as SEQ ID NOs: 2, 4, and 6. Cytosine deaminases derived from bacteria are set forth as SEQ ID NOs: 7-12.

TABLE 2
Deaminase sequences

| Deaminase | SEQ ID |
|---|---|
| APG09980 | 1 |
| APG09980.1 | 2 |
| APG05840 | 3 |
| APG05840.1 | 4 |
| APG00868 | 5 |
| APG00868.1 | 6 |
| APG30125 | 7 |
| APG30126 | 8 |
| APG30127 | 9 |
| APG30128 | 10 |
| APG30129 | 11 |
| APG30130 | 12 |

[0685] To determine if the deaminases of Table 2 are able to perform cytosine base editing in mammalian cells, each deaminase was operably fused to an RGN nickase to produce a fusion protein. Residues predicted to deactivate the RuvC domain of the RGN APG07433.1 (SEQ ID NO: 74; described in PCT Publication No. WO 2019/236566, incorporated by reference herein) were identified and the RGN was modified to a nickase variant (nAPG07433.1; SEQ ID NO: 75). A nickase variant of an RGN is referred to herein as “nRGN”. It should be understood that any nickase variant of an RGN may be used to produce a fusion protein of the invention.

[0686] Deaminase and nRGN nucleotide sequences codon optimized for mammalian expression were synthesized as fusion proteins with an N-terminal nuclear localization tag and cloned into the pTwist CMV (Twist Biosciences) expression plasmid. Each fusion protein comprises, starting at the amino terminus, the SV40 NLS (SEQ ID NO: 76) operably linked at the C-terminal end to 3× FLAG Tag (SEQ ID NO: 77), operably linked at the C-terminal end to a deaminase, operably linked at the C-terminal end to a peptide linker (L16 or L32; set forth as SEQ ID NO: 78 or 79, respectively), operably linked at the C-terminal end to the nRGN (for example, nAPG07433.1, which is SEQ ID NO: 75), finally operably linked at the C-terminal end to the nucleoplasmin NLS (SEQ ID NO: 80). Table 3 shows the fusion proteins produced and tested for activity. All fusion proteins comprise at least one NLS and a 3× FLAG Tag, as described above. The APG05840.1-nAPG07433.1-USP2 fusion protein in Table 3 further comprises a uracil stabilizing protein USP2 (set forth as SEQ ID NO: 81) between the nRGN and the nucleoplasmin NLS. This fusion protein also comprises a peptide linker having the sequence set forth as SEQ ID NO: 120 between nAPG07433.1 and the USP2.

TABLE 3
Fusion protein sequences with N-terminus SV40 NLS,
3X FLAG Tag and C-terminus Nucleoplasmin NLS

| Fusion Protein | SEQ ID |
|---|---|
| APG09980-L16- | 13 |
| nAPG07433.1 | |
| APG09980.1-L16- | 14 |
| nAPG07433.1 | |
| APG05840-L16- | 15 |
| nAPG07433.1 | |
| APG05840.1-L16- | 16 |
| nAPG07433.1 | |
| APG00868-L16- | 17 |
| nAPG07433.1 | |
| APG00868.1-L16- | 18 |
| nAPG07433.1 | |
| APG30125- | 19 |
| nAPG07433.1 | |
| APG30126- | 20 |
| nAPG07433.1 | |
| APG30127- | 21 |
| nAPG07433.1 | |
| APG30128- | 22 |
| nAPG07433.1 | |
| APG30129- | 23 |
| nAPG07433.1 | |
| APG05840.1- | 24 |
| nAPG07433.1- | |
| USP2 | |
| APG30130- | 145 |
| nAPG07433.1 | |

[0687] Expression plasmids comprising an expression cassette encoding a sgRNA were also produced. Human genomic target sequences and the sgRNA sequences for guiding the fusion proteins to the genomic targets are indicated in Table 4.

TABLE 4
Guide RNA sequences

| | | | Forward | Reverse |
|---|---|---|---|---|
| | Target | sgRNA | Primer for | Primer for |
| sgRNA ID | sequence | sequence | amplification | amplification |
| SGN000169 | 25 | 34 | 43 | 52 |
| SGN000173 | 26 | 35 | 44 | 53 |
| SGN000929 | 27 | 36 | 45 | 54 |
| SGN001101 | 28 | 37 | 46 | 55 |
| SGN000927 | 29 | 38 | 47 | 56 |
| SGN000143 | 30 | 39 | 48 | 57 |
| SGN000186 | 31 | 40 | 49 | 58 |
| SGN000194 | 32 | 41 | 50 | 59 |
| SGN000930 | 33 | 42 | 51 | 60 |

[0688] 500 ng of plasmid comprising an expression cassette comprising a coding sequence for each fusion protein shown in Table 3 and 500 ng of plasmid comprising an expression cassette encoding an sgRNA shown in Table 4 were co-transfected into HEK293FT cells at 75-90% confluency in 24-well plates using Lipofectamine 2000 reagent (Life Technologies). Cells were then incubated at 370 C for 72 h. Following incubation, genomic DNA was then extracted using NucleoSpin 96 Tissue (Macherey-Nagel) following the manufacturer's protocol. The genomic region flanking the targeted genomic site was PCR amplified using the primers in Table 4 and products were purified using ZR-96 DNA Clean and Concentrator (Zymo Research) following the manufacturer's protocol. The purified PCR products were then sent for Next Generation Sequencing on Illumina MiSeq (2×250). Results were analyzed for INDEL formation or introduction of % specific cytosine mutations.

[0689] Table 5 shows all cytosine base editing for each combination of a fusion protein from Table 3 and a guide RNA from Table 4. Tables 6-11 show the specific nucleotide mutation profile for select exemplary samples. The position of each nucleotide in the target sequence was determined. “C17” indicates, for example, a cytosine at position 17 of the target sequence. The position of each nucleotide in the target sequence was determined by numbering the first nucleotide in the target sequence closest to the PAM as position 1, and the position number increases in the 3′ direction away from the PAM sequence. Tables 6-11 also show which nucleotide the cytosine was changed to, and at what rate. For example, Table 6 shows that for the APG30127-nAPG07433.1 fusion protein, the cytosine at position 17 was mutated to a thymidine at a rate of 0.2%.

TABLE 5
Estimate of base editing for each deaminase
and linker combination tested

| | | % Mutated |
|---|---|---|
| Construct | Target | Reads |
| APG09980_L16_nAPG07433.1 | SGN001101 | 29.18% |
| APG09980_L16_nAPG07433.1 | SGN000929 | 24.48% |
| APG09980_L16_nAPG07433.1 | SGN000169 | 24.79% |
| APG09980_L16_nAPG07433.1 | SGN000173 | 17.71% |
| APG09980_L16_nAPG07433.1 | SGN000143 | 11.20% |
| APG09980_L16_nAPG07433.1 | SGN000930 | 25.25% |
| APG09980.1_L16_nAPG07433.1 | SGN001101 | 30.52% |
| APG09980.1_L16_nAPG07433.1 | SGN000929 | 25.95% |
| APG09980.1_L16_nAPG07433.1 | SGN000169 | 24.05% |
| APG09980.1_L16_nAPG07433.1 | SGN000173 | 22.25% |
| APG09980.1_L16_nAPG07433.1 | SGN000143 | 9.70% |
| APG09980.1_L16_nAPG07433.1 | SGN000930 | 23.80% |
| APG05840_L16_nAPG07433.1 | SGN001101 | 24.30% |
| APG05840_L16_nAPG07433.1 | SGN000929 | 27.67% |
| APG05840_L16_nAPG07433.1 | SGN000169 | 20.53% |
| APG05840_L16_nAPG07433.1 | SGN000173 | 11.38% |
| APG05840_L16_nAPG07433.1 | SGN000143 | 15.13% |
| APG05840_L16_nAPG07433.1 | SGN000930 | 22.38% |
| APG05840.1_L16_nAPG07433.1 | SGN001101 | 23.83% |
| APG05840.1_L16_nAPG07433.1 | SGN000929 | 22.34% |
| APG05840.1_L16_nAPG07433.1 | SGN000169 | 30.22% |
| APG05840.1_L16_nAPG07433.1 | SGN000173 | 20.44% |
| APG05840.1_L16_nAPG07433.1 | SGN000143 | 10.97% |
| APG05840.1_L16_nAPG07433.1 | SGN000930 | 22.22% |
| APG05840.1-L16- | SGN001101 | 12.67% |
| nAPG07433.1-USP2 | | |
| APG05840.1-L16- | SGN000929 | 11.14% |
| nAPG07433.1-USP2 | | |
| APG05840.1-L16- | SGN000169 | 22.56% |
| nAPG07433.1-USP2 | | |
| APG05840.1-L16- | SGN000173 | 11.36% |
| nAPG07433.1-USP2 | | |
| APG05840.1-L16- | SGN000930 | 13.11% |
| nAPG07433.1-USP2 | | |
| APG05840.1-L16- | SGN000143 | 6.25% |
| nAPG07433.1-USP2 | | |
| APG00868_L16_nAPG07433.1 | SGN001101 | 24.40% |
| APG00868_L16_nAPG07433.1 | SGN000929 | 20.62% |
| APG00868_L16_nAPG07433.1 | SGN000169 | 16.36% |
| APG00868_L16_nAPG07433.1 | SGN000173 | 13.22% |
| APG00868_L16_nAPG07433.1 | SGN000143 | 8.36% |
| APG00868_L16_nAPG07433.1 | SGN000930 | 14.86% |
| APG00868.1_L16_nAPG07433.1 | SGN001101 | 20.36% |
| APG00868.1_L16_nAPG07433.1 | SGN000929 | 14.64% |
| APG00868.1_L16_nAPG07433.1 | SGN000169 | 22.39% |
| APG00868.1_L16_nAPG07433.1 | SGN000173 | 18.37% |
| APG00868.1_L16_nAPG07433.1 | SGN000143 | 6.33% |
| APG00868.1_L16_nAPG07433.1 | SGN000930 | 12.29% |
| APG30125-L32-nAPG07433.1 | SGN001101 | 2.72% |
| APG30125-L32-nAPG07433.1 | SGN000929 | 7.39% |
| APG30125-L32-nAPG07433.1 | SGN000169 | 6.89% |
| APG30125-L32-nAPG07433.1 | SGN000173 | 3.54% |
| APG30125-L32-nAPG07433.1 | SGN000930 | 6.32% |
| APG30125-L32-nAPG07433.1 | SGN000143 | 0% |
| APG30126-L32-nAPG07433.1 | SGN000930 | 1.38% |
| APG30126-L32-nAPG07433.1 | SGN000143 | 0% |
| APG30126-L32-nAPG07433.1 | SGN000186 | 0% |
| APG30126-L32-nAPG07433.1 | SGN000194 | 0% |
| APG30126-L32-nAPG07433.1 | SGN000927 | 0% |
| APG30126-L32-nAPG07433.1 | SGN000139 | 0% |
| APG30127-L32-nAPG07433.1 | SGN000930 | 6.22% |
| APG30127-L32-nAPG07433.1 | SGN000143 | 2.46% |
| APG30127-L32-nAPG07433.1 | SGN000186 | 14.26% |
| APG30127-L32-nAPG07433.1 | SGN000194 | 9.53% |
| APG30127-L32-nAPG07433.1 | SGN000927 | 3.26% |
| APG30127-L32-nAPG07433.1 | SGN000139 | 0.00% |
| APG30128-L32-nAPG07433.1 | SGN000930 | 2.03% |
| APG30128-L32-nAPG07433.1 | SGN000143 | 0.00% |
| APG30128-L32-nAPG07433.1 | SGN000186 | 0.00% |
| APG30128-L32-nAPG07433.1 | SGN000194 | 0.00% |
| APG30128-L32-nAPG07433.1 | SGN000927 | 0.00% |
| APG30128-L32-nAPG07433.1 | SGN000139 | 0.00% |
| APG30129-L32-nAPG07433.1 | SGN000930 | 3.47% |
| APG30129-L32-nAPG07433.1 | SGN000143 | 2.02% |
| APG30129-L32-nAPG07433.1 | SGN000186 | 11.40% |
| APG30129-L32-nAPG07433.1 | SGN000194 | 5.92% |
| APG30129-L32-nAPG07433.1 | SGN000927 | 0.00% |
| APG30129-L32-nAPG07433.1 | SGN000139 | 0.00% |
| APG30130-L32-nAPG07433.1 | SGN000930 | 3.14% |
| APG30130-L32-nAPG07433.1 | SGN000143 | 0.00% |
| APG30130-L32-nAPG07433.1 | SGN000186 | 2.78% |
| APG30130-L32-nAPG07433.1 | SGN000194 | 3.29% |
| APG30130-L32-nAPG07433.1 | SGN000927 | 0.00% |

TABLE 6
C > N Editing Rate using deaminase
APG30127 and guide SGN000930

| | | SGN000930 | | |
|---|---|---|---|---|
| | | C17 | C19 | C22 |
| APG30127 | A | 0 | 0 | 0 |
| | G | 5.3 | 0.4 | 0 |
| | T | 0.2 | 0.4 | 0.2 |

[0690] APG30127 showed predominantly C>G conversions at position C17.

TABLE 7
C > N Editing Rate using deaminase APG30127 and guide SGN000186

| | | SGN000186 | | | | | | | | | |
|---|---|---|---|---|---|---|---|---|---|---|---|
| | | C10 | C12 | C17 | C23 | C24 | C29 | C3 | C4 | C5 | C7 |
| APG30127 | A | 0.2 | 0 | 0.5 | 0.1 | 0 | 0 | 0 | 0 | 0 | 0.1 |
| | G | 0.1 | 0 | 0.6 | 0 | 0.1 | 0.2 | 0 | 0 | 0 | 0 |
| | T | 1.6 | 3.3 | 2 | 0.1 | 0 | 0.2 | 0.1 | 0.1 | 0 | 0 |

[0691] APG30127 shows C>T conversions at multiple positions, including C10, C12, and C17. At position C17, there is also C>G and C>A conversions.

TABLE 8
C > N Editing Rate using deaminase APG30129 and guide SGN000186

| | | SGN000186 | | | | | | | | | |
|---|---|---|---|---|---|---|---|---|---|---|---|
| | | C10 | C12 | C17 | C23 | C24 | C29 | C3 | C4 | C5 | C7 |
| APG30129 | A | 0.1 | 0 | 0.3 | 0.1 | 0.2 | 0.2 | 0 | 0 | 0 | 0 |
| | G | 0.2 | 0.2 | 0.5 | 0 | 0 | 0 | 0 | 0 | 0 | 0 |
| | T | 1.1 | 3.5 | 1.2 | 0.1 | 0 | 0.1 | 0 | 0 | 0.2 | 0.3 |

[0692] APG30129 shows C>T conversions at positions C10, C12, and C17.

TABLE 9
C > N Editing Rate using deaminase APG30125 and guide SGN000186

| | | SGN000186 | | | | | | | | | |
|---|---|---|---|---|---|---|---|---|---|---|---|
| | | C10 | C12 | C17 | C23 | C24 | C29 | C3 | C4 | C5 | C7 |
| APG30125 | A | 0.4 | 0.1 | 0.3 | 0 | 0 | 0.1 | 0 | 0 | 0 | 0 |
| | G | 0.2 | 0 | 0.1 | 0 | 0 | 0.1 | 0 | 0 | 0 | 0 |
| | T | 1 | 2.9 | 1.3 | 0.2 | 0.1 | 0.2 | 0 | 0 | 0.1 | 0 |

[0693] APG30125 shows C>T conversions at positions C10, C12, and C17. There is less C>G and C>A conversions at all positions than the APG30129 and APG30127 samples.

TABLE 10
C > N Editing Rate using deaminase APG05840.1-
L16- nAPG07433.1-USP2 and guide SGN000169

| | | SGN000169 | | | | | | | | | |
|---|---|---|---|---|---|---|---|---|---|---|---|
| | | C4 | C9 | C13 | C15 | C18 | C20 | C23 | C26 | C27 | C29 |
| APG05840.1-L16- | A | 0 | 0 | 0.1 | 0.2 | 0.1 | 0.1 | 0 | 0.2 | 0 | 0 |
| nAPG07433.1- | G | 0 | 0 | 0.1 | 0.8 | 0 | 0 | 0 | 0 | 0 | 0 |
| USP2 | T | 0 | 5.3 | 16.3 | 20.2 | 2.1 | 11.3 | 7.4 | 0 | 0 | 0 |

[0694] Truncated APG05840 (APG05840.1) was tested with a 16 amino acid linker (L16) and a uracil stabilizing protein (USP2). This construct showed high levels of specific C>T editing at several positions in target SGN000169, including C9, C13, C15, C20 and C23. This demonstrates that the shortened deaminase and the shorter linker can still be used to generate site specific single nucleotide edits.

TABLE 11
C > N Editing Rate using deaminase APG05840.1-
L16- nAPG07433.1-USP2 and guide SGN000173

| | | SGN000173 | | | | | | | | | | |
|---|---|---|---|---|---|---|---|---|---|---|---|---|
| | | C1 | C3 | C4 | C7 | C8 | C10 | C11 | C17 | C2 | C20 | C29 |
| APG05840.1-L16- | A | 0 | 0 | 0 | 0 | 0.1 | 0 | 0 | 0.3 | 0 | 0 | 0 |
| nAPG07433.1-USP2 | G | 0 | 0 | 0 | 0 | 0 | 0.1 | 0.1 | 0 | 0 | 0 | 0 |
| | T | 0 | 0 | 0 | 3.4 | 6.4 | 5 | 1.9 | 9.3 | 0 | 0.7 | 0 |

[0695] Truncated APG05840 (APG05840.1) was tested with a 16 amino acid linker (L16) and a uracil stabilizing protein (USP2). This construct showed high levels of specific C>T editing at several positions in target SGN000173, including C7, C8, C10, and C17.

### Example 2: Off-Target, RGN-independent Cytosine Deaminase Driven Effects Assay

[0696] In order to determine if there are any mutational effects on ssDNA by the cytosine deaminase, an RGN-independent, off-target mutation assay was performed. Residues predicted to deactivate the RuvC and HNH domains of the RGN APG09298 (SEQ ID NO: 82; described in PCT Publication No. WO 2021/217002, which is herein incorporated by reference in its entirety) were identified and the RGN was modified to a dead variant (dAPG09298; SEQ ID NO: 83).

[0697] The dRGN nucleotide sequence codon optimized for expression was synthesized as fusion proteins with an N-terminal nuclear localization tag and cloned into the pTwist CMV (Twist Biosciences) expression plasmid. This dRGN fusion protein comprises, starting at the amino terminus, the SV40 NLS (SEQ ID NO: 76) operably linked at the C-terminal end to 3× FLAG Tag (SEQ ID NO: 77), operably linked at the C-terminal end to the dRGN (for example, dAPG09298, which is SEQ ID NO: 83), finally operably linked at the C-terminal end to the Nucleoplasmin NLS (SEQ ID NO: 80) to make NLS-dAPG09298-NLS (SEQ ID NO: 84). This construct is used to create ssDNA in an R-loop at a location unrelated to the target sequence being edited by the cytosine deaminase base editor.

[0698] Expression plasmids comprising an expression cassette encoding a sgRNA were also produced. Human genomic target sequences and the sgRNA sequences for guiding the fusion proteins to the genomic targets are indicated in Table 4.

TABLE 12
Off-target guide RNA sequences

| | | | Forward | Reverse |
|---|---|---|---|---|
| | Target | sgRNA | Primer for | Primer for |
| sgRNA ID | sequence | sequence | amplification | amplification |
| SGN001165 | 61 | 62 | 63 | 64 |

[0699] 500 ng of plasmid comprising an expression cassette comprising a coding sequence for a fusion protein shown in Table 3 and 500 ng of plasmid comprising an expression cassette encoding an sgRNA shown in Table 4 and 500 ng of plasmid comprising an expression cassette comprising a coding sequence for NLS-dAPG09298-NLS and 500 ng of plasmid comprising an expression cassette encoding an sgRNA for dAPG09298 shown in Table 12 were co-transfected into HEK293FT cells at 75-90% confluency in 24-well plates using Lipofectamine 2000 reagent (Life Technologies). Cells were then incubated at 370 C for 72 h. Following incubation, genomic DNA was then extracted using NucleoSpin 96 Tissue (Macherey-Nagel) following the manufacturer's protocol. The genomic region flanking the targeted genomic site was PCR amplified using the primers in Table 4 or Table 12 and products were purified using ZR-96 DNA Clean and Concentrator (Zymo Research) following the manufacturer's protocol. The purified PCR products were then sent for Next Generation Sequencing on Illumina MiSeq (2×250). Results were analyzed for INDEL formation or specific cytosine mutation. On-target results were those identified by the amplicon in Table 4. RGN-independent, off-target results were those identified by the amplicon in Table 12.

TABLE 13
Deaminase-driven RGN-independent, off-target
effects with APG05840-nAPG07433.1-USP2

| | | % Mutated reads at off |
|---|---|---|
| | % Mutated reads | target site for deaminase- |
| | at On Target site | driven effects (SGN001165) |
| SGN001101 | 19.7% | 0.99% |
| SGN000929 | 24% | 0% |
| SGN000169 | 25% | 0% |
| SGN000173 | 18.24% | 0% |
| SGN000930 | 20.24% | 0% |
| SGN000143 | 18.13% | 0% |

[0700] The intended on-target site for each sample showed high levels of cytosine specific mutations. The off-target site, bound by dAPG09298 at SGN001165 showed no mutated reads in five out of six samples. One target tested showed low mutation rates at the off-target location with 0.99% f reads having mutations. These may be RGN-independent, deaminase-driven mutation effects, but could also be sequencing errors because of the low rate in the sample.

### Example 3: Demonstration of C>G Base Editing in Mammalian Cells

[0701] These studies assessed whether the orientation of the deaminase and RGN to each other in a fusion protein affects the type of base editing that occurs by the resultant C base editor.

[0702] Residues predicted to deactivate the RuvC domain of the RGN APG07433.1 (SEQ ID NO: 74; PCT Publication No. WO 2019/236566, incorporated by reference herein) were identified and the RGN was modified to a nickase variant (nAPG07433.1; SEQ ID NO: 75).

[0703] Deaminase (APG09980 and APG05840; set forth as SEQ ID NOs: 1 and 3, respectively) and nAPG07433.1 nucleotide sequences codon optimized for expression were synthesized as fusion proteins with an N-terminal nuclear localization tag and cloned into the pTwist CMV (Twist Biosciences) expression plasmid. Each fusion protein comprises, starting at the amino terminus, the SV40 NLS (SEQ ID NO: 76) operably linked at the C-terminal end to 3× FLAG Tag (SEQ ID NO: 77), operably linked at the C-terminal end to the nRGN-deaminase, deaminase-nRGN-USP2, or deaminase-nRGN fusion protein, connected by a peptide linker (SEQ ID NO: 79), finally operably linked at the C-terminal end to the Nucleoplasmin NLS (SEQ ID NO: 80). Table 14 shows the fusion proteins produced and tested for activity. All fusion proteins comprise at least one NLS and a 3× FLAG Tag, as described above. The APG09980-nAPG07433.1-USP2 and APG05840.1-nAPG07433.1-USP2 fusion protein in Table 14 further comprise a uracil stabilizing protein USP2 (set forth as SEQ ID NO: 81) between the nRGN and the nucleoplasmin NLS. The APG09980-nAPG07433.1-USP2 and APG05840.1-nAPG07433.1-USP2 fusion proteins also comprises a peptide linker having the sequence set forth as SEQ ID NO: 120 between nAPG07433.1 and the USP2.

TABLE 14
Fusion protein sequences with N-terminus SV40 NLS,
3X FLAG Tag and C-terminus Nucleoplasmin NLS

| Fusion Protein | SEQ ID |
|---|---|
| nAPG07433.1- | 65 |
| APG09980 | |
| nAPG07433.1- | 66 |
| APG05840 | |
| APG09980- | 67 |
| nAPG07433.1- | |
| USP2 | |
| APG05840- | 68 |
| nAPG07433.1- | |
| USP2 | |
| APG05840- | 69 |
| nAPG07433.1 | |

[0704] Expression plasmids comprising an expression cassette encoding a sgRNA were also produced. Human genomic target sequences and the sgRNA sequences for guiding the fusion proteins to the genomic targets are indicated in Table 15.

TABLE 15
guide RNA sequences

| | | | Forward | Reverse |
|---|---|---|---|---|
| | Target | sgRNA | Primer for | Primer for |
| sgRNA ID | sequence | sequence | amplification | amplification |
| SGN000930 | 33 | 42 | 51 | 60 |
| SGN000928 | 70 | 71 | 72 | 73 |

[0705] 500 ng of plasmid comprising an expression cassette comprising a coding sequence for a fusion protein shown in Table 14 and 500 ng of plasmid comprising an expression cassette encoding for an sgRNA shown in Table 15 were co-transfected into HEK293FT cells at 75-90% confluency in 24-well plates using Lipofectamine 2000 reagent (Life Technologies). Cells were then incubated at 370 C for 72 h. Following incubation, genomic DNA was then extracted using NucleoSpin 96 Tissue (Macherey-Nagel) following the manufacturer's protocol. The genomic region flanking the targeted genomic site was PCR amplified using the primers in Table 15 and products were purified using ZR-96 DNA Clean and Concentrator (Zymo Research) following the manufacturer's protocol. The purified PCR products were then sent for Next Generation Sequencing on Illumina MiSeq (2×250). Results were analyzed for INDEL formation or specific cytosine mutation.

[0706] Tables 16-20 show cytosine base editing for each combination of a fusion protein from Table 14 and a guide RNA from Table 15. The position of each nucleotide in the target sequence was determined. “C16” indicates, for example, a cytosine at position 16 of the target sequence. The position of each nucleotide in the target sequence was determined by numbering the first nucleotide in the target sequence closest to the PAM as position 1, and the position number increases in the 3′ direction away from the PAM sequence. Tables 16-20 also show which nucleotide the cytosine was changed to, and at what rate. For example, Table 16 shows that for the APG05840-nAPG07433.1-USP2 fusion protein, the cytosine at position 16 was mutated to a thymidine at a rate of 11%.

TABLE 16
C > N Editing Rate using deaminase APG05840 and guide SGN000928

| | | SGN000928 | | | | | | | | | |
|---|---|---|---|---|---|---|---|---|---|---|---|
| | | C2 | C3 | C4 | C7 | C11 | C16 | C18 | C21 | C24 | C27 |
| APG05840- | A | 0 | 0 | 0 | 0 | 0.1 | 0.4 | 0.2 | 0.1 | 0 | 0 |
| nAPG07433.1-USP2 | G | 0 | 0 | 0 | 0 | 0.4 | 1.4 | 0 | 0.6 | 0 | 0 |
| | T | 0 | 0 | 0 | 0.8 | 3.3 | 11 | 2.1 | 11 | 0.3 | 2.2 |

[0707] In the orientation with the deaminase on the N-terminus in the full construct APG05840-nAPG07433.1-USP2, high levels of specific C>T conversion are evident at positions C16 and C21 in SGN000928.

TABLE 17
C > N Editing Rate using deaminase
APG05840 and guide SGN000930

| | | SGN000930 | | |
|---|---|---|---|---|
| | | C17 | C19 | C22 |
| APG05840- | A | 0 | 0 | 0 |
| nAPG07433.1- | G | 4.9 | 0 | 0 |
| USP2 | T | 17 | 2.8 | 6.9 |

[0708] In the orientation with the deaminase on the N-terminus in the full construct APG05840-nAPG07433.1-USP2, high levels of specific C>T conversion are evident at positions C17 and C22 in SGN000930. Some C>G conversion is evident at position C17.

TABLE 18
C > N Editing Rate using deaminase APG05840 and guide SGN000928

| | | SGN000928 | | | | | | | | | |
|---|---|---|---|---|---|---|---|---|---|---|---|
| | | C2 | C3 | C4 | C7 | C11 | C16 | C18 | C21 | C24 | C27 |
| nAPG07433.1- | A | 0 | 0 | 0 | 0 | 0.1 | 0.5 | 0 | 0.2 | 0 | 0 |
| APG05840 | G | 0 | 0 | 0 | 0 | 0.3 | 15 | 0 | 0 | 0 | 0 |
| | T | 0 | 0 | 0 | 0 | 0.1 | 0.9 | 0 | 0.2 | 0 | 0 |

[0709] When the orientation of the deaminase tethered to the nickase is reversed and the deaminase is tethered to the C-terminus, the primary editing outcome is C>G conversion at position C16 in target SGN000928. Very little C>T conversion is evident compared to the N-terminus configuration.

TABLE 19
C > N Editing Rate using deaminase
APG05840 and guide SGN000930

| | | SGN000930 | | |
|---|---|---|---|---|
| | | C17 | C19 | C22 |
| nAPG07433.1- | A | 0.1 | 0 | 0 |
| APG05840 | G | 17.5 | 0 | 0 |
| | T | 0.8 | 0 | 0 |

[0710] When the deaminase is tethered to the C-terminus of the nickase, the primary editing outcome is C>G conversion at position C17 in target SGN000930.

TABLE 20
C > N Editing Rate using deaminase
APG09980 and guide SGN000930

| | | SGN000930 | | |
|---|---|---|---|---|
| | | C17 | C19 | C22 |
| nAPG07433.1- | A | 0.2 | 0 | 0 |
| APG09980 | G | 13 | 0 | 0 |
| | T | 0.6 | 0 | 0 |

[0711] Using a second deaminase module, APG09980, the same trend is evident where when tethered to the C-terminus of the nickase, the predominant mutational outcome is C>G conversion at position C17.

TABLE 21
C > N Editing Rate using deaminase
APG05840 and guide SGN000930

| | | SGN000930 | | |
|---|---|---|---|---|
| | | C17 | C19 | C22 |
| APG05840- | A | 0.3 | 0.4 | 1.55 |
| nAPG07433.1 | G | 29.4 | 0.3 | 0.35 |
| | T | 2 | 1.85 | 3.2 |

[0712] When APG05840 is tethered to the N-terminus of nAPG07433.1, the primary mutation outcome is C>G conversion in position C17 with guide SGN000930.

TABLE 22
Overall mutation and deletion rate in base edited samples

| | | % of | % of |
|---|---|---|---|
| | | Mutated | Reads with |
| Construct | SGN | Reads | Deletions |
| APG09980- | SGN000930 | 21.42 | 2.09 |
| nAPG07433.1 | | | |
| nAPG07433.1- | SGN000930 | 18.38 | 0 |
| APG09980 | | | |
| APG09980- | SGN000930 | 21.505 | 0.313 |
| nAPG07433.1- | | | |
| USP2 | | | |
| APG05840- | SGN000930 | 18.735 | 0 |
| nAPG07433.1 | | | |
| APG05840- | SGN000930 | 22.595 | 0.355 |
| nAPG07433.1- | SGN000928 | 19.24 | 1.87 |
| USP2 | | | |
| nAPG07433.1- | SGN000930 | 17.475 | 0.285 |
| APG05840 | SGN000928 | 20.9 | 0.39 |

[0713] The data in this table is an average of multiple editing experiments. The percent of mutated reads is an estimate of the base editing rate in each sample. The percent of reads with deletions estimates the deletion rate in the sample. The C-terminus fusion of APG09980 to nAPG07433.1 has a lower deletion rate than the N-terminal fusion with and without a USP.

[0714] APG05840-nAPG07433.1-USP2 showed predominantly C>T conversion at positions C17 in guide SGN000930 and C16 and C21 in SGN000928. nAPG07433.1-APG09980 and nAPG07433.1-APG05840 showed predominantly C>G conversion at these same positions. All constructs showed editing in the same windows.

### Example 4: Targeted Base-Editing for Correction of Causal Disease Mutations

[0715] A database of clinical variants was obtained from NCBI ClinVar database, which is available through the world wide web at the NCBI ClinVar website. Pathogenic Single Nucleotide Polymorphisms (SNPs) were identified from this list. Using the genomic locus information, CRISPR targets in the region overlapping and surrounding each SNP were identified. A selection of SNPs that can be corrected using base editing in combination with an RGN, such as for example APG07433.1 or a variant thereof, to target the causal mutation is listed in Table 23. In Table 23 below, only one alias of each disease is listed. The “RS #” corresponds to the RS accession number through the SNP database at the NCBI website. The “Name” column contains the genetic locus identifier, the gene name, the location of the mutation in the gene, and the change resulting from the mutation.

TABLE 23
Disease Targets for Base Editing

| | | | Potential Target |
|---|---|---|---|
| | | | Sequence for |
| | | | RGN |
| | | | APG07433.1 |
| Indication | RS# | Name | (SEQ ID NO) |
| Acute neuronopathic | 1064651 | NM_000157.3(GBA): c.1342G > C | 122 |
| Gaucher's disease | | (p.Asp448His) | |
| Alpha-1-antitrypsin | 28931569 | NM_001127701.1(SERPINA1): c.194T > C | 123 |
| deficiency | | (p.Leu65Pro) | |
| Amyotrophic lateral | 121908287 | NM_014845.5(FIG. 4): c.122T > C | 124 |
| sclerosis type 11 | | (p.Ile41Thr) | |
| Ataxia- | 587781558 | NM_000051.3(ATM): c.2921 + 1G > A, | 125 |
| telangiectasia | | NM_000051.3(ATM): c.2921 + 1G > T, | |
| syndrome | | NM_000051.3(ATM): c.2921 + 1G > C | |
| Biotinidase | 28934601 | NM_000060.4(BTD): c.755A > G | 126 |
| deficiency | | (p.Asp252Gly) | |
| Carbohydrate- | 80338709 | NM_000303.2(PMM2): c.722G > C | 127 |
| deficient glycoprotein | | (p.Cys241Ser) | |
| syndrome type I | | | |
| Congenital myotonia | 80356696 | NM_000083.2(CLCN1): c.1655A > G | 128 |
| | | (p.Gln552Arg) | |
| Cowden syndrome 1 | 1114167621 | NM_000314.6(PTEN): c.210 − 1G > A, | 129 |
| | | NM_000314.6(PTEN): c.210 − 1G > C, | |
| | | NM_000314.6(PTEN): c.210 − 1G > T | |
| Cystic fibrosis | 75096551 | NM_000492.3(CFTR): c.2988 + 1G > A, | 130 |
| | | NM_000492.3(CFTR): c.2988 + 1G > C | |
| Dopamine beta | 74853476 | NM_000787.3(DBH): c.339 + 2T > C | 131 |
| hydroxylase | | | |
| deficiency | | | |
| Familial | 121908031 | NM_000527.4(LDLR): c.2043C > A (p.Cys681Ter), | 132 |
| hypercholesterolemia | | NM_000527.4(LDLR): c.2043C > G (p.Cys681Trp) | |
| Familial | 28940579 | NM_000243.2(MEFV): c.2177T > C (p.Val726Ala) | 133 |
| Mediterranean fever | | | |
| Glutaric aciduria | 199999619 | NM_000159.3(GCDH): c.1244 − 2A > C, | 134 |
| | | NM_000159.3(GCDH): c.1244 − 2A > G | |
| Inclusion body | 779694939 | NM_001128227.2(GNE): c.740T > C | 135 |
| myopathy 2 | | (p.Val247Ala) | |
| LCHAD Deficiency | 137852769 | NM_000182.4(HADHA): c.1528G > C | 136 |
| | | (p.Glu510Gln) | |
| Long QT syndrome | 267607277 | NM_006888.5(CALM1): c.293A > G | 137 |
| | | (p.Asn98Ser) | |
| Mucopolysaccharidos | 199801029 | NM_000203.4(IDUA): c.979G > C | 138 |
| is type I | | (p.Ala327Pro) | |
| Niemann-Pick | 80358259 | NM_000271.4(NPC1): c.3182T > C | 139 |
| disease | | (p.Ile1061Thr) | |
| Pendred syndrome | 111033313 | NM_000441.1(SLC26A4): c.919 − 2A > G | 140 |
| Primary familial | 727505017 | NM_002880.3(RAF1): c.769T > C | 141 |
| hypertrophic | | (p.Ser257Pro) | |
| cardiomyopathy | | | |
| Pyridoxine- | 121912707 | NM 001182.4(ALDH7A1): c. 1279G > C | 142 |
| dependent epilepsy | | (p.Glu427Gln) | |
| Shwachman | 113993993 | NM_016038.2(SBDS): c.258 + 2T > C | 143 |
| syndrome | | | |
| Wilson disease | 201738967 | NM_000053.3(ATP7B): c.122A > G | 144 |
| | | (p.Asn41Ser) | |

### Example 5: Demonstration of Gene Editing Activity in Plant Cells

[0716] Base-editing activity of an RGN-deaminase fusion protein of the invention is demonstrated in plant cells using protocols adapted from Li, et al., 2013 (Nat. Biotech. 31:688-691). Briefly, an expression vector comprising an expression cassette capable of expressing in plant cells an RGN-deaminase fusion protein operably linked to a SV40 nuclear localization signal (SEQ ID NO: 76) and a second expression cassette encoding a guide RNA targeting one or more sites in the plant PDS gene that flank an appropriate PAM sequence are introduced into Nicotiana benthamiana mesophyll protoplasts using PEG-mediated transformation. The transformed protoplasts are incubated in the dark for up to 36 hr. Genomic DNA is isolated from the protoplasts using a DNeasy Plant Mini Kit (Qiagen). The genomic region flanking the RGN target site is PCR amplified, products are purified, and the purified PCR products are analyzed using Next Generation Sequencing on Illumina MiSeq. Typically, 100,000 of 250 bp paired-end reads (2×100,000 reads) are generated per amplicon. The reads are analyzed using CRISPResso (Pinello, et al. 2016 Nature Biotech, 34:695-697) to calculate the rates of editing. Output alignments are analyzed for INDEL formation or introduction of specific cytosine mutations.

The application's sequence listing, which the Patent Office published only in electronic form, follows.

SEQUENCE LISTING (357 sequences)

SEQ ID NO: 1 - protein, 230 aa, Artificial Sequence
  source: /note="Description of Artificial Sequence: Synthetic polypeptide"
MAAGPAPEARSLMDEQTFLDNFNNLKYPRKTYLCYEVELLVGENHIPLDDYKGFVHNEGFDMGLERCHAELIFLERMASWNLDTELRYRITVFISWSPCPECADELVKFLRENRHVNLRIFAARIYDWYQGYEAGLRALKAAGAEVAMMTLHEFEYCWNNFVDHQQDEDTPFPPWDNLVARSEELSQRLEGILQPSVLVFCWPSQVSVTAAHSDIMSQASRAWEKRRDPP

SEQ ID NO: 2 - protein, 182 aa, Artificial Sequence
  source: /note="Description of Artificial Sequence: Synthetic polypeptide"
MDEQTFLDNFNNLKYPRKTYLCYEVELLVGENHIPLDDYKGFVHNEGFDMGLERCHAELIFLERMASWNLDTELRYRITVFISWSPCPECADELVKFLRENRHVNLRIFAARIYDWYQGYEAGLRALKAAGAEVAMMTLHEFEYCWNNFVDHQQDEDTPFPPWDNLVARSEELSQRLEGILQ

SEQ ID NO: 3 - protein, 201 aa, Artificial Sequence
  source: /note="Description of Artificial Sequence: Synthetic polypeptide"
MEASPASRPRPLMDPHMFTGNFTNNPRVFGLHQTYLCYEVKRQGPDGTRDLMNEQRDFLCNQAKNHFSGSEDHHAERCFLDRIPSWQLDPAQTYRVTCFISWSPCFSCAQEVAEFLHENPHVNLRIFAARIYDYLPRYEEGLQMLQNAGAQVSIMTSEEFGHCWDTFVDRQGHPFQPWEGLDEHSQALSGRLQAILQNQGN

SEQ ID NO: 4 - protein, 185 aa, Artificial Sequence
  source: /note="Description of Artificial Sequence: Synthetic polypeptide"
MDPHMFTGNFTNNPRVFGLHQTYLCYEVKRQGPDGTRDLMNEQRDFLCNQAKNHFSGSEDHHAERCFLDRIPSWQLDPAQTYRVTCFISWSPCFSCAQEVAEFLHENPHVNLRIFAARIYDYLPRYEEGLQMLQNAGAQVSIMTSEEFGHCWDTFVDRQGHPFQPWEGLDEHSQALSGRLQAILQ

SEQ ID NO: 5 - protein, 192 aa, Artificial Sequence
  source: /note="Description of Artificial Sequence: Synthetic polypeptide"
MEPWRPSPRNPMDRIDPNTFRFHFPNLLYASGRKLCYLCFQVETGDYFSCDDSDRGVFRNKVHPWARCHAEQCFLSWFRDQYPCRDEYYNVTWFLSWSPCPTCAEEVVEFLEEYRNLTLSIFTSRLYYFYHPNYQQGLRKLWDAGVQLDIMSCDDFEHCWDNFVDHKGMRFQRRNLLKDYDFLAAELQEILR

SEQ ID NO: 6 - protein, 178 aa, Artificial Sequence
  source: /note="Description of Artificial Sequence: Synthetic polypeptide"
MDPNTFRFHFPNLLYASGRKLCYLCFQVETGDYFSCDDSDRGVFRNKVHPWARCHAEQCFLSWFRDQYPCRDEYYNVTWFLSWSPCPTCAEEVVEFLEEYRNLTLSIFTSRLYYFYHPNYQQGLRKLWDAGVQLDIMSCDDFEHCWDNFVDHKGMRFQRRNLLKDYDFLAAELQEILR

SEQ ID NO: 7 - protein, 152 aa, Artificial Sequence
  source: /note="Description of Artificial Sequence: Synthetic polypeptide"
MINLVQTPYDLNSGYPIVRRTLEDKKKLVKHEGFGPESCCATIEYTLRGNSRYAFGNSQMQVEMPPNIYAHNWVKLHGEMTALVAAIRRIERVDSTSAVLPITSAYIELRPCEASCLPALHNMLPDNITVYFSFLHPTQVDQWKQSARALCA

SEQ ID NO: 8 - protein, 152 aa, Artificial Sequence
  source: /note="Description of Artificial Sequence: Synthetic polypeptide"
MPVLIKVPYDINSANGVVQACLRKKREVVQSKDNGGITGIGAGSCCSFVVYMKHGGDVDNVFGNSRIRIPFKVNGIEIANACAHGELTALWNAIADEPSIPTILAMYIEMSPCTKCQSALDNLLQPGQEIYYSFDHPGEVKAWQAAAKHLCA

SEQ ID NO: 9 - protein, 148 aa, Artificial Sequence
  source: /note="Description of Artificial Sequence: Synthetic polypeptide"
MIKTEYSLSSGYPIVRRTLEDKKNLVKQPGFGPESCCAVVQYRLRGNIRYAFGNSRMQISMPPGIYTHNWVRLHGEMAALVAAINRIERYSTDDVIPITAAYIELRPCEANCMQALRNILPEDACVYYSFDHPTQVDEWKLRANELCS

SEQ ID NO: 10 - protein, 147 aa, Artificial Sequence
  source: /note="Description of Artificial Sequence: Synthetic polypeptide"
MIKTEYTLRSGYPIVRRTLENKKNLVKQPGFGPESCCAVVEYRLRGNIRYAFGNSRMQVSVPPGIYTNNWVRLHGEMAALVAAIERIERFSSDDVIPITAAYIELRPCEANCMQALHNILPENANVYYSFDHPTQVEEWKLRAHELC

SEQ ID NO: 11 - protein, 147 aa, Artificial Sequence
  source: /note="Description of Artificial Sequence: Synthetic polypeptide"
MIKTEYALNSGYPIVRRTLEDKKKLVKQPGFGPESCCAVVEYRLRGNIRYAFGNSQMHVSMPPGIYTHNWVKLHGEMAALVAAINRIERFSTDDVIPITGAYIELRPCEANCLQALHNILPEDANVYYSFDHPTQLDEWKLRAHELC

SEQ ID NO: 12 - protein, 147 aa, Artificial Sequence
  source: /note="Description of Artificial Sequence: Synthetic polypeptide"
MIQLVQAEYSIKSGYPIVRRTLEDKKKLIEKPGFGPESCCATIEYQLRGSTRYAFGNSQMKMEMPPDIYTHNWVKLHAEMAALVAAIRRIERFDADKEQVPITNVYIELRPCEANCMQALQNILPDGTTVYYSFLHPTEVEEWKRSA

SEQ ID NO: 13 - protein, 1364 aa, Artificial Sequence
  source: /note="Description of Artificial Sequence: Synthetic polypeptide"
MAPKKKRKVDYKDHDGDYKDHDIDYKDDDDKMAAGPAPEARSLMDEQTFLDNFNNLKYPRKTYLCYEVELLVGENHIPLDDYKGFVHNEGFDMGLERCHAELIFLERMASWNLDTELRYRITVFISWSPCPECADELVKFLRENRHVNLRIFAARIYDWYQGYEAGLRALKAAGAEVAMMTLHEFEYCWNNFVDHQQDEDTPFPPWDNLVARSEELSQRLEGILQPSVLVFCWPSQVSVTAAHSDIMSQASRAWEKRRDPPSGSETPGTSESATPESMRELDYRIGLAIGTNSIGWGVIELSWNKDRERYEKVRIVDQGVRMFDRAEMPKTGASLAEPRRIARSSRRRLNRKSQRKKNIRNLLVQHGVITQEELDSLYPLSKKSMDIWGIRLDGLDRLLNHFEWARLLIHLAQRRGFKSNRKSELKDTETGKVLSSIQLNEKRLSLYRTVGEMWMKDPDFSKYDRKRNSPNEYVFSVSRAELEKEIVTLFAAQRRFQSPYASKDLQETYLQIWTHQLPFASGNAILNKVGYCSLLKGKERRIPKATYTFQYFSALDQVNRTRLGPDFQPFTKEQREIILNNMFQRTDYYKKKTIPEVTYYDIRKWLELDETIQFKGLNYDPNEELKKIEKKPFINLKAFYEINKVVANYSERTNETFSTLDYDGIGYALTVYKTDKDIRSYLKSSHNLPKRCYDDQLIEELLSLSYTKFGHLSLKAINHVLSIMQKGNTYKEAVDQLGYDTSGLKKEKRSKFLPPISDEITNPIVKRALTQARKVVNAIIRRHGSPHSVHIELARELSKNHDERTKIVSAQDENYKKNKGAISILSEHGILNPTGYDIVRYKLWKEQGERCAYSLKEIPADTFFNELKKERNGAPILEVDHILPYSQSFIDSYHNKVLVYSDENRKKGNRIPYTYFLETNKDWEAFERYVRSNKFFSKKKREYLLKRAYLPRESELIKERHLNDTRYASTFLKNFIEQNLQFKEAEDNPRKRRVQTVNGVITAHFRKRWGLEKDRQETYLHHAMDAIIVACTDHHMVTRVTEYYQIKESNKSVKKPYFPMPWEGFRDELLSHLASQPIAKKISEELKAGYQSLDYIFVSRMPKRSITGAAHKQTIMRKGGIDKKGKTIIIERLHLKDIKFDENGDFKMVGKEQDMATYEAIKQRYLEHGKNSKKAFETPLYKPSKKGTGNLIKRVKVEGQAKSFVREVNGGVAQNGDLVRVDLFEKDDKYYMVPIYVPDTVCSELPKKVVASSKGYEQWLTLDNSFTFKFSLYPYDLVRLVKGDEDRFLYFGTLDIDSDRLNFKDVNKPSKKNEYRYSLKTIEDLEKYEVGVLGDLRLVRKETRRNFHKRPAATKKAGQAKKKK

SEQ ID NO: 14 - protein, 1316 aa, Artificial Sequence
  source: /note="Description of Artificial Sequence: Synthetic polypeptide"
MAPKKKRKVDYKDHDGDYKDHDIDYKDDDDKMDEQTFLDNFNNLKYPRKTYLCYEVELLVGENHIPLDDYKGFVHNEGFDMGLERCHAELIFLERMASWNLDTELRYRITVFISWSPCPECADELVKFLRENRHVNLRIFAARIYDWYQGYEAGLRALKAAGAEVAMMTLHEFEYCWNNFVDHQQDEDTPFPPWDNLVARSEELSQRLEGILQSGSETPGTSESATPESMRELDYRIGLAIGTNSIGWGVIELSWNKDRERYEKVRIVDQGVRMFDRAEMPKTGASLAEPRRIARSSRRRLNRKSQRKKNIRNLLVQHGVITQEELDSLYPLSKKSMDIWGIRLDGLDRLLNHFEWARLLIHLAQRRGFKSNRKSELKDTETGKVLSSIQLNEKRLSLYRTVGEMWMKDPDFSKYDRKRNSPNEYVFSVSRAELEKEIVTLFAAQRRFQSPYASKDLQETYLQIWTHQLPFASGNAILNKVGYCSLLKGKERRIPKATYTFQYFSALDQVNRTRLGPDFQPFTKEQREIILNNMFQRTDYYKKKTIPEVTYYDIRKWLELDETIQFKGLNYDPNEELKKIEKKPFINLKAFYEINKVVANYSERTNETFSTLDYDGIGYALTVYKTDKDIRSYLKSSHNLPKRCYDDQLIEELLSLSYTKFGHLSLKAINHVLSIMQKGNTYKEAVDQLGYDTSGLKKEKRSKFLPPISDEITNPIVKRALTQARKVVNAIIRRHGSPHSVHIELARELSKNHDERTKIVSAQDENYKKNKGAISILSEHGILNPTGYDIVRYKLWKEQGERCAYSLKEIPADTFFNELKKERNGAPILEVDHILPYSQSFIDSYHNKVLVYSDENRKKGNRIPYTYFLETNKDWEAFERYVRSNKFFSKKKREYLLKRAYLPRESELIKERHLNDTRYASTFLKNFIEQNLQFKEAEDNPRKRRVQTVNGVITAHFRKRWGLEKDRQETYLHHAMDAIIVACTDHHMVTRVTEYYQIKESNKSVKKPYFPMPWEGFRDELLSHLASQPIAKKISEELKAGYQSLDYIFVSRMPKRSITGAAHKQTIMRKGGIDKKGKTIIIERLHLKDIKFDENGDFKMVGKEQDMATYEAIKQRYLEHGKNSKKAFETPLYKPSKKGTGNLIKRVKVEGQAKSFVREVNGGVAQNGDLVRVDLFEKDDKYYMVPIYVPDTVCSELPKKVVASSKGYEQWLTLDNSFTFKFSLYPYDLVRLVKGDEDRFLYFGTLDIDSDRLNFKDVNKPSKKNEYRYSLKTIEDLEKYEVGVLGDLRLVRKETRRNFHKRPAATKKAGQAKKKK

SEQ ID NO: 15 - protein, 1335 aa, Artificial Sequence
  source: /note="Description of Artificial Sequence: Synthetic polypeptide"
MAPKKKRKVDYKDHDGDYKDHDIDYKDDDDKMEASPASRPRPLMDPHMFTGNFTNNPRVFGLHQTYLCYEVKRQGPDGTRDLMNEQRDFLCNQAKNHFSGSEDHHAERCFLDRIPSWQLDPAQTYRVTCFISWSPCFSCAQEVAEFLHENPHVNLRIFAARIYDYLPRYEEGLQMLQNAGAQVSIMTSEEFGHCWDTFVDRQGHPFQPWEGLDEHSQALSGRLQAILQNQGNSGSETPGTSESATPESMRELDYRIGLAIGTNSIGWGVIELSWNKDRERYEKVRIVDQGVRMFDRAEMPKTGASLAEPRRIARSSRRRLNRKSQRKKNIRNLLVQHGVITQEELDSLYPLSKKSMDIWGIRLDGLDRLLNHFEWARLLIHLAQRRGFKSNRKSELKDTETGKVLSSIQLNEKRLSLYRTVGEMWMKDPDFSKYDRKRNSPNEYVFSVSRAELEKEIVTLFAAQRRFQSPYASKDLQETYLQIWTHQLPFASGNAILNKVGYCSLLKGKERRIPKATYTFQYFSALDQVNRTRLGPDFQPFTKEQREIILNNMFQRTDYYKKKTIPEVTYYDIRKWLELDETIQFKGLNYDPNEELKKIEKKPFINLKAFYEINKVVANYSERTNETFSTLDYDGIGYALTVYKTDKDIRSYLKSSHNLPKRCYDDQLIEELLSLSYTKFGHLSLKAINHVLSIMQKGNTYKEAVDQLGYDTSGLKKEKRSKFLPPISDEITNPIVKRALTQARKVVNAIIRRHGSPHSVHIELARELSKNHDERTKIVSAQDENYKKNKGAISILSEHGILNPTGYDIVRYKLWKEQGERCAYSLKEIPADTFFNELKKERNGAPILEVDHILPYSQSFIDSYHNKVLVYSDENRKKGNRIPYTYFLETNKDWEAFERYVRSNKFFSKKKREYLLKRAYLPRESELIKERHLNDTRYASTFLKNFIEQNLQFKEAEDNPRKRRVQTVNGVITAHFRKRWGLEKDRQETYLHHAMDAIIVACTDHHMVTRVTEYYQIKESNKSVKKPYFPMPWEGFRDELLSHLASQPIAKKISEELKAGYQSLDYIFVSRMPKRSITGAAHKQTIMRKGGIDKKGKTIIIERLHLKDIKFDENGDFKMVGKEQDMATYEAIKQRYLEHGKNSKKAFETPLYKPSKKGTGNLIKRVKVEGQAKSFVREVNGGVAQNGDLVRVDLFEKDDKYYMVPIYVPDTVCSELPKKVVASSKGYEQWLTLDNSFTFKFSLYPYDLVRLVKGDEDRFLYFGTLDIDSDRLNFKDVNKPSKKNEYRYSLKTIEDLEKYEVGVLGDLRLVRKETRRNFHKRPAATKKAGQAKKKK

SEQ ID NO: 16 - protein, 1319 aa, Artificial Sequence
  source: /note="Description of Artificial Sequence: Synthetic polypeptide"
MAPKKKRKVDYKDHDGDYKDHDIDYKDDDDKMDPHMFTGNFTNNPRVFGLHQTYLCYEVKRQGPDGTRDLMNEQRDFLCNQAKNHFSGSEDHHAERCFLDRIPSWQLDPAQTYRVTCFISWSPCFSCAQEVAEFLHENPHVNLRIFAARIYDYLPRYEEGLQMLQNAGAQVSIMTSEEFGHCWDTFVDRQGHPFQPWEGLDEHSQALSGRLQAILQSGSETPGTSESATPESMRELDYRIGLAIGTNSIGWGVIELSWNKDRERYEKVRIVDQGVRMFDRAEMPKTGASLAEPRRIARSSRRRLNRKSQRKKNIRNLLVQHGVITQEELDSLYPLSKKSMDIWGIRLDGLDRLLNHFEWARLLIHLAQRRGFKSNRKSELKDTETGKVLSSIQLNEKRLSLYRTVGEMWMKDPDFSKYDRKRNSPNEYVFSVSRAELEKEIVTLFAAQRRFQSPYASKDLQETYLQIWTHQLPFASGNAILNKVGYCSLLKGKERRIPKATYTFQYFSALDQVNRTRLGPDFQPFTKEQREIILNNMFQRTDYYKKKTIPEVTYYDIRKWLELDETIQFKGLNYDPNEELKKIEKKPFINLKAFYEINKVVANYSERTNETFSTLDYDGIGYALTVYKTDKDIRSYLKSSHNLPKRCYDDQLIEELLSLSYTKFGHLSLKAINHVLSIMQKGNTYKEAVDQLGYDTSGLKKEKRSKFLPPISDEITNPIVKRALTQARKVVNAIIRRHGSPHSVHIELARELSKNHDERTKIVSAQDENYKKNKGAISILSEHGILNPTGYDIVRYKLWKEQGERCAYSLKEIPADTFFNELKKERNGAPILEVDHILPYSQSFIDSYHNKVLVYSDENRKKGNRIPYTYFLETNKDWEAFERYVRSNKFFSKKKREYLLKRAYLPRESELIKERHLNDTRYASTFLKNFIEQNLQFKEAEDNPRKRRVQTVNGVITAHFRKRWGLEKDRQETYLHHAMDAIIVACTDHHMVTRVTEYYQIKESNKSVKKPYFPMPWEGFRDELLSHLASQPIAKKISEELKAGYQSLDYIFVSRMPKRSITGAAHKQTIMRKGGIDKKGKTIIIERLHLKDIKFDENGDFKMVGKEQDMATYEAIKQRYLEHGKNSKKAFETPLYKPSKKGTGNLIKRVKVEGQAKSFVREVNGGVAQNGDLVRVDLFEKDDKYYMVPIYVPDTVCSELPKKVVASSKGYEQWLTLDNSFTFKFSLYPYDLVRLVKGDEDRFLYFGTLDIDSDRLNFKDVNKPSKKNEYRYSLKTIEDLEKYEVGVLGDLRLVRKETRRNFHKRPAATKKAGQAKKKK

SEQ ID NO: 17 - protein, 1326 aa, Artificial Sequence
  source: /note="Description of Artificial Sequence: Synthetic polypeptide"
MAPKKKRKVDYKDHDGDYKDHDIDYKDDDDKMEPWRPSPRNPMDRIDPNTFRFHFPNLLYASGRKLCYLCFQVETGDYFSCDDSDRGVFRNKVHPWARCHAEQCFLSWFRDQYPCRDEYYNVTWFLSWSPCPTCAEEVVEFLEEYRNLTLSIFTSRLYYFYHPNYQQGLRKLWDAGVQLDIMSCDDFEHCWDNFVDHKGMRFQRRNLLKDYDFLAAELQEILRSGSETPGTSESATPESMRELDYRIGLAIGTNSIGWGVIELSWNKDRERYEKVRIVDQGVRMFDRAEMPKTGASLAEPRRIARSSRRRLNRKSQRKKNIRNLLVQHGVITQEELDSLYPLSKKSMDIWGIRLDGLDRLLNHFEWARLLIHLAQRRGFKSNRKSELKDTETGKVLSSIQLNEKRLSLYRTVGEMWMKDPDFSKYDRKRNSPNEYVFSVSRAELEKEIVTLFAAQRRFQSPYASKDLQETYLQIWTHQLPFASGNAILNKVGYCSLLKGKERRIPKATYTFQYFSALDQVNRTRLGPDFQPFTKEQREIILNNMFQRTDYYKKKTIPEVTYYDIRKWLELDETIQFKGLNYDPNEELKKIEKKPFINLKAFYEINKVVANYSERTNETFSTLDYDGIGYALTVYKTDKDIRSYLKSSHNLPKRCYDDQLIEELLSLSYTKFGHLSLKAINHVLSIMQKGNTYKEAVDQLGYDTSGLKKEKRSKFLPPISDEITNPIVKRALTQARKVVNAIIRRHGSPHSVHIELARELSKNHDERTKIVSAQDENYKKNKGAISILSEHGILNPTGYDIVRYKLWKEQGERCAYSLKEIPADTFFNELKKERNGAPILEVDHILPYSQSFIDSYHNKVLVYSDENRKKGNRIPYTYFLETNKDWEAFERYVRSNKFFSKKKREYLLKRAYLPRESELIKERHLNDTRYASTFLKNFIEQNLQFKEAEDNPRKRRVQTVNGVITAHFRKRWGLEKDRQETYLHHAMDAIIVACTDHHMVTRVTEYYQIKESNKSVKKPYFPMPWEGFRDELLSHLASQPIAKKISEELKAGYQSLDYIFVSRMPKRSITGAAHKQTIMRKGGIDKKGKTIIIERLHLKDIKFDENGDFKMVGKEQDMATYEAIKQRYLEHGKNSKKAFETPLYKPSKKGTGNLIKRVKVEGQAKSFVREVNGGVAQNGDLVRVDLFEKDDKYYMVPIYVPDTVCSELPKKVVASSKGYEQWLTLDNSFTFKFSLYPYDLVRLVKGDEDRFLYFGTLDIDSDRLNFKDVNKPSKKNEYRYSLKTIEDLEKYEVGVLGDLRLVRKETRRNFHKRPAATKKAGQAKKKK

SEQ ID NO: 18 - protein, 1312 aa, Artificial Sequence
  source: /note="Description of Artificial Sequence: Synthetic polypeptide"
MAPKKKRKVDYKDHDGDYKDHDIDYKDDDDKMDPNTFRFHFPNLLYASGRKLCYLCFQVETGDYFSCDDSDRGVFRNKVHPWARCHAEQCFLSWFRDQYPCRDEYYNVTWFLSWSPCPTCAEEVVEFLEEYRNLTLSIFTSRLYYFYHPNYQQGLRKLWDAGVQLDIMSCDDFEHCWDNFVDHKGMRFQRRNLLKDYDFLAAELQEILRSGSETPGTSESATPESMRELDYRIGLAIGTNSIGWGVIELSWNKDRERYEKVRIVDQGVRMFDRAEMPKTGASLAEPRRIARSSRRRLNRKSQRKKNIRNLLVQHGVITQEELDSLYPLSKKSMDIWGIRLDGLDRLLNHFEWARLLIHLAQRRGFKSNRKSELKDTETGKVLSSIQLNEKRLSLYRTVGEMWMKDPDFSKYDRKRNSPNEYVFSVSRAELEKEIVTLFAAQRRFQSPYASKDLQETYLQIWTHQLPFASGNAILNKVGYCSLLKGKERRIPKATYTFQYFSALDQVNRTRLGPDFQPFTKEQREIILNNMFQRTDYYKKKTIPEVTYYDIRKWLELDETIQFKGLNYDPNEELKKIEKKPFINLKAFYEINKVVANYSERTNETFSTLDYDGIGYALTVYKTDKDIRSYLKSSHNLPKRCYDDQLIEELLSLSYTKFGHLSLKAINHVLSIMQKGNTYKEAVDQLGYDTSGLKKEKRSKFLPPISDEITNPIVKRALTQARKVVNAIIRRHGSPHSVHIELARELSKNHDERTKIVSAQDENYKKNKGAISILSEHGILNPTGYDIVRYKLWKEQGERCAYSLKEIPADTFFNELKKERNGAPILEVDHILPYSQSFIDSYHNKVLVYSDENRKKGNRIPYTYFLETNKDWEAFERYVRSNKFFSKKKREYLLKRAYLPRESELIKERHLNDTRYASTFLKNFIEQNLQFKEAEDNPRKRRVQTVNGVITAHFRKRWGLEKDRQETYLHHAMDAIIVACTDHHMVTRVTEYYQIKESNKSVKKPYFPMPWEGFRDELLSHLASQPIAKKISEELKAGYQSLDYIFVSRMPKRSITGAAHKQTIMRKGGIDKKGKTIIIERLHLKDIKFDENGDFKMVGKEQDMATYEAIKQRYLEHGKNSKKAFETPLYKPSKKGTGNLIKRVKVEGQAKSFVREVNGGVAQNGDLVRVDLFEKDDKYYMVPIYVPDTVCSELPKKVVASSKGYEQWLTLDNSFTFKFSLYPYDLVRLVKGDEDRFLYFGTLDIDSDRLNFKDVNKPSKKNEYRYSLKTIEDLEKYEVGVLGDLRLVRKETRRNFHKRPAATKKAGQAKKKK

SEQ ID NO: 19 - protein, 1306 aa, Artificial Sequence
  source: /note="Description of Artificial Sequence: Synthetic polypeptide"
MAPKKKRKVDYKDHDGDYKDHDIDYKDDDDKMINLVQTPYDLNSGYPIVRRTLEDKKKLVKHEGFGPESCCATIEYTLRGNSRYAFGNSQMQVEMPPNIYAHNWVKLHGEMTALVAAIRRIERVDSTSAVLPITSAYIELRPCEASCLPALHNMLPDNITVYFSFLHPTQVDQWKQSARALCASGGSSGGSSGSETPGTSESATPESSGGSSGGSMRELDYRIGLAIGTNSIGWGVIELSWNKDRERYEKVRIVDQGVRMFDRAEMPKTGASLAEPRRIARSSRRRLNRKSQRKKNIRNLLVQHGVITQEELDSLYPLSKKSMDIWGIRLDGLDRLLNHFEWARLLIHLAQRRGFKSNRKSELKDTETGKVLSSIQLNEKRLSLYRTVGEMWMKDPDFSKYDRKRNSPNEYVFSVSRAELEKEIVTLFAAQRRFQSPYASKDLQETYLQIWTHQLPFASGNAILNKVGYCSLLKGKERRIPKATYTFQYFSALDQVNRTRLGPDFQPFTKEQREIILNNMFQRTDYYKKKTIPEVTYYDIRKWLELDETIQFKGLNYDPNEELKKIEKKPFINLKAFYEINKVVANYSERTNETFSTLDYDGIGYALTVYKTDKDIRSYLKSSHNLPKRCYDDQLIEELLSLSYTKFGHLSLKAINHVLSIMQKGNTYKEAVDQLGYDTSGLKKEKRSKFLPPISDEITNPIVKRALTQARKVVNAIIRRHGSPHSVHIELARELSKNHDERTKIVSAQDENYKKNKGAISILSEHGILNPTGYDIVRYKLWKEQGERCAYSLKEIPADTFFNELKKERNGAPILEVDHILPYSQSFIDSYHNKVLVYSDENRKKGNRIPYTYFLETNKDWEAFERYVRSNKFFSKKKREYLLKRAYLPRESELIKERHLNDTRYASTFLKNFIEQNLQFKEAEDNPRKRRVQTVNGVITAHFRKRWGLEKDRQETYLHHAMDAIIVACTDHHMVTRVTEYYQIKESNKSVKKPYFPMPWEGFRDELLSHLASQPIAKKISEELKAGYQSLDYIFVSRMPKRSITGAAHKQTIMRKGGIDKKGKTIIIERLHLKDIKFDENGDFKMVGKEQDMATYEAIKQRYLEHGKNSKKAFETPLYKPSKKGTGNLIKRVKVEGQAKSFVREVNGGVAQNGDLVRVDLFEKDDKYYMVPIYVPDTVCSELPKKVVASSKGYEQWLTLDNSFTFKFSLYPYDLVRLVKGDEDRFLYFGTLDIDSDRLNFKDVNKPSKKNEYRYSLKTIEDLEKYEVGVLGDLRLVRKETRRNFHSGGSKRPAATKKAGQAKKKK

SEQ ID NO: 20 - protein, 1306 aa, Artificial Sequence
  source: /note="Description of Artificial Sequence: Synthetic polypeptide"
MAPKKKRKVDYKDHDGDYKDHDIDYKDDDDKMPVLIKVPYDINSANGVVQACLRKKREVVQSKDNGGITGIGAGSCCSFVVYMKHGGDVDNVFGNSRIRIPFKVNGIEIANACAHGELTALWNAIADEPSIPTILAMYIEMSPCTKCQSALDNLLQPGQEIYYSFDHPGEVKAWQAAAKHLCASGGSSGGSSGSETPGTSESATPESSGGSSGGSMRELDYRIGLAIGTNSIGWGVIELSWNKDRERYEKVRIVDQGVRMFDRAEMPKTGASLAEPRRIARSSRRRLNRKSQRKKNIRNLLVQHGVITQEELDSLYPLSKKSMDIWGIRLDGLDRLLNHFEWARLLIHLAQRRGFKSNRKSELKDTETGKVLSSIQLNEKRLSLYRTVGEMWMKDPDFSKYDRKRNSPNEYVFSVSRAELEKEIVTLFAAQRRFQSPYASKDLQETYLQIWTHQLPFASGNAILNKVGYCSLLKGKERRIPKATYTFQYFSALDQVNRTRLGPDFQPFTKEQREIILNNMFQRTDYYKKKTIPEVTYYDIRKWLELDETIQFKGLNYDPNEELKKIEKKPFINLKAFYEINKVVANYSERTNETFSTLDYDGIGYALTVYKTDKDIRSYLKSSHNLPKRCYDDQLIEELLSLSYTKFGHLSLKAINHVLSIMQKGNTYKEAVDQLGYDTSGLKKEKRSKFLPPISDEITNPIVKRALTQARKVVNAIIRRHGSPHSVHIELARELSKNHDERTKIVSAQDENYKKNKGAISILSEHGILNPTGYDIVRYKLWKEQGERCAYSLKEIPADTFFNELKKERNGAPILEVDHILPYSQSFIDSYHNKVLVYSDENRKKGNRIPYTYFLETNKDWEAFERYVRSNKFFSKKKREYLLKRAYLPRESELIKERHLNDTRYASTFLKNFIEQNLQFKEAEDNPRKRRVQTVNGVITAHFRKRWGLEKDRQETYLHHAMDAIIVACTDHHMVTRVTEYYQIKESNKSVKKPYFPMPWEGFRDELLSHLASQPIAKKISEELKAGYQSLDYIFVSRMPKRSITGAAHKQTIMRKGGIDKKGKTIIIERLHLKDIKFDENGDFKMVGKEQDMATYEAIKQRYLEHGKNSKKAFETPLYKPSKKGTGNLIKRVKVEGQAKSFVREVNGGVAQNGDLVRVDLFEKDDKYYMVPIYVPDTVCSELPKKVVASSKGYEQWLTLDNSFTFKFSLYPYDLVRLVKGDEDRFLYFGTLDIDSDRLNFKDVNKPSKKNEYRYSLKTIEDLEKYEVGVLGDLRLVRKETRRNFHSGGSKRPAATKKAGQAKKKK

SEQ ID NO: 21 - protein, 1302 aa, Artificial Sequence
  source: /note="Description of Artificial Sequence: Synthetic polypeptide"
MAPKKKRKVDYKDHDGDYKDHDIDYKDDDDKMIKTEYSLSSGYPIVRRTLEDKKNLVKQPGFGPESCCAVVQYRLRGNIRYAFGNSRMQISMPPGIYTHNWVRLHGEMAALVAAINRIERYSTDDVIPITAAYIELRPCEANCMQALRNILPEDACVYYSFDHPTQVDEWKLRANELCSSGGSSGGSSGSETPGTSESATPESSGGSSGGSMRELDYRIGLAIGTNSIGWGVIELSWNKDRERYEKVRIVDQGVRMFDRAEMPKTGASLAEPRRIARSSRRRLNRKSQRKKNIRNLLVQHGVITQEELDSLYPLSKKSMDIWGIRLDGLDRLLNHFEWARLLIHLAQRRGFKSNRKSELKDTETGKVLSSIQLNEKRLSLYRTVGEMWMKDPDFSKYDRKRNSPNEYVFSVSRAELEKEIVTLFAAQRRFQSPYASKDLQETYLQIWTHQLPFASGNAILNKVGYCSLLKGKERRIPKATYTFQYFSALDQVNRTRLGPDFQPFTKEQREIILNNMFQRTDYYKKKTIPEVTYYDIRKWLELDETIQFKGLNYDPNEELKKIEKKPFINLKAFYEINKVVANYSERTNETFSTLDYDGIGYALTVYKTDKDIRSYLKSSHNLPKRCYDDQLIEELLSLSYTKFGHLSLKAINHVLSIMQKGNTYKEAVDQLGYDTSGLKKEKRSKFLPPISDEITNPIVKRALTQARKVVNAIIRRHGSPHSVHIELARELSKNHDERTKIVSAQDENYKKNKGAISILSEHGILNPTGYDIVRYKLWKEQGERCAYSLKEIPADTFFNELKKERNGAPILEVDHILPYSQSFIDSYHNKVLVYSDENRKKGNRIPYTYFLETNKDWEAFERYVRSNKFFSKKKREYLLKRAYLPRESELIKERHLNDTRYASTFLKNFIEQNLQFKEAEDNPRKRRVQTVNGVITAHFRKRWGLEKDRQETYLHHAMDAIIVACTDHHMVTRVTEYYQIKESNKSVKKPYFPMPWEGFRDELLSHLASQPIAKKISEELKAGYQSLDYIFVSRMPKRSITGAAHKQTIMRKGGIDKKGKTIIIERLHLKDIKFDENGDFKMVGKEQDMATYEAIKQRYLEHGKNSKKAFETPLYKPSKKGTGNLIKRVKVEGQAKSFVREVNGGVAQNGDLVRVDLFEKDDKYYMVPIYVPDTVCSELPKKVVASSKGYEQWLTLDNSFTFKFSLYPYDLVRLVKGDEDRFLYFGTLDIDSDRLNFKDVNKPSKKNEYRYSLKTIEDLEKYEVGVLGDLRLVRKETRRNFHSGGSKRPAATKKAGQAKKKK

SEQ ID NO: 22 - protein, 1301 aa, Artificial Sequence
  source: /note="Description of Artificial Sequence: Synthetic polypeptide"
MAPKKKRKVDYKDHDGDYKDHDIDYKDDDDKMIKTEYTLRSGYPIVRRTLENKKNLVKQPGFGPESCCAVVEYRLRGNIRYAFGNSRMQVSVPPGIYTNNWVRLHGEMAALVAAIERIERFSSDDVIPITAAYIELRPCEANCMQALHNILPENANVYYSFDHPTQVEEWKLRAHELCSGGSSGGSSGSETPGTSESATPESSGGSSGGSMRELDYRIGLAIGTNSIGWGVIELSWNKDRERYEKVRIVDQGVRMFDRAEMPKTGASLAEPRRIARSSRRRLNRKSQRKKNIRNLLVQHGVITQEELDSLYPLSKKSMDIWGIRLDGLDRLLNHFEWARLLIHLAQRRGFKSNRKSELKDTETGKVLSSIQLNEKRLSLYRTVGEMWMKDPDFSKYDRKRNSPNEYVFSVSRAELEKEIVTLFAAQRRFQSPYASKDLQETYLQIWTHQLPFASGNAILNKVGYCSLLKGKERRIPKATYTFQYFSALDQVNRTRLGPDFQPFTKEQREIILNNMFQRTDYYKKKTIPEVTYYDIRKWLELDETIQFKGLNYDPNEELKKIEKKPFINLKAFYEINKVVANYSERTNETFSTLDYDGIGYALTVYKTDKDIRSYLKSSHNLPKRCYDDQLIEELLSLSYTKFGHLSLKAINHVLSIMQKGNTYKEAVDQLGYDTSGLKKEKRSKFLPPISDEITNPIVKRALTQARKVVNAIIRRHGSPHSVHIELARELSKNHDERTKIVSAQDENYKKNKGAISILSEHGILNPTGYDIVRYKLWKEQGERCAYSLKEIPADTFFNELKKERNGAPILEVDHILPYSQSFIDSYHNKVLVYSDENRKKGNRIPYTYFLETNKDWEAFERYVRSNKFFSKKKREYLLKRAYLPRESELIKERHLNDTRYASTFLKNFIEQNLQFKEAEDNPRKRRVQTVNGVITAHFRKRWGLEKDRQETYLHHAMDAIIVACTDHHMVTRVTEYYQIKESNKSVKKPYFPMPWEGFRDELLSHLASQPIAKKISEELKAGYQSLDYIFVSRMPKRSITGAAHKQTIMRKGGIDKKGKTIIIERLHLKDIKFDENGDFKMVGKEQDMATYEAIKQRYLEHGKNSKKAFETPLYKPSKKGTGNLIKRVKVEGQAKSFVREVNGGVAQNGDLVRVDLFEKDDKYYMVPIYVPDTVCSELPKKVVASSKGYEQWLTLDNSFTFKFSLYPYDLVRLVKGDEDRFLYFGTLDIDSDRLNFKDVNKPSKKNEYRYSLKTIEDLEKYEVGVLGDLRLVRKETRRNFHSGGSKRPAATKKAGQAKKKK

SEQ ID NO: 23 - protein, 1301 aa, Artificial Sequence
  source: /note="Description of Artificial Sequence: Synthetic polypeptide"
MAPKKKRKVDYKDHDGDYKDHDIDYKDDDDKMIKTEYALNSGYPIVRRTLEDKKKLVKQPGFGPESCCAVVEYRLRGNIRYAFGNSQMHVSMPPGIYTHNWVKLHGEMAALVAAINRIERFSTDDVIPITGAYIELRPCEANCLQALHNILPEDANVYYSFDHPTQLDEWKLRAHELCSGGSSGGSSGSETPGTSESATPESSGGSSGGSMRELDYRIGLAIGTNSIGWGVIELSWNKDRERYEKVRIVDQGVRMFDRAEMPKTGASLAEPRRIARSSRRRLNRKSQRKKNIRNLLVQHGVITQEELDSLYPLSKKSMDIWGIRLDGLDRLLNHFEWARLLIHLAQRRGFKSNRKSELKDTETGKVLSSIQLNEKRLSLYRTVGEMWMKDPDFSKYDRKRNSPNEYVFSVSRAELEKEIVTLFAAQRRFQSPYASKDLQETYLQIWTHQLPFASGNAILNKVGYCSLLKGKERRIPKATYTFQYFSALDQVNRTRLGPDFQPFTKEQREIILNNMFQRTDYYKKKTIPEVTYYDIRKWLELDETIQFKGLNYDPNEELKKIEKKPFINLKAFYEINKVVANYSERTNETFSTLDYDGIGYALTVYKTDKDIRSYLKSSHNLPKRCYDDQLIEELLSLSYTKFGHLSLKAINHVLSIMQKGNTYKEAVDQLGYDTSGLKKEKRSKFLPPISDEITNPIVKRALTQARKVVNAIIRRHGSPHSVHIELARELSKNHDERTKIVSAQDENYKKNKGAISILSEHGILNPTGYDIVRYKLWKEQGERCAYSLKEIPADTFFNELKKERNGAPILEVDHILPYSQSFIDSYHNKVLVYSDENRKKGNRIPYTYFLETNKDWEAFERYVRSNKFFSKKKREYLLKRAYLPRESELIKERHLNDTRYASTFLKNFIEQNLQFKEAEDNPRKRRVQTVNGVITAHFRKRWGLEKDRQETYLHHAMDAIIVACTDHHMVTRVTEYYQIKESNKSVKKPYFPMPWEGFRDELLSHLASQPIAKKISEELKAGYQSLDYIFVSRMPKRSITGAAHKQTIMRKGGIDKKGKTIIIERLHLKDIKFDENGDFKMVGKEQDMATYEAIKQRYLEHGKNSKKAFETPLYKPSKKGTGNLIKRVKVEGQAKSFVREVNGGVAQNGDLVRVDLFEKDDKYYMVPIYVPDTVCSELPKKVVASSKGYEQWLTLDNSFTFKFSLYPYDLVRLVKGDEDRFLYFGTLDIDSDRLNFKDVNKPSKKNEYRYSLKTIEDLEKYEVGVLGDLRLVRKETRRNFHSGGSKRPAATKKAGQAKKKK

SEQ ID NO: 24 - protein, 1449 aa, Artificial Sequence
  source: /note="Description of Artificial Sequence: Synthetic polypeptide"
MAPKKKRKVDYKDHDGDYKDHDIDYKDDDDKMDPHMFTGNFTNNPRVFGLHQTYLCYEVKRQGPDGTRDLMNEQRDFLCNQAKNHFSGSEDHHAERCFLDRIPSWQLDPAQTYRVTCFISWSPCFSCAQEVAEFLHENPHVNLRIFAARIYDYLPRYEEGLQMLQNAGAQVSIMTSEEFGHCWDTFVDRQGHPFQPWEGLDEHSQALSGRLQAILQSGSETPGTSESATPESMRELDYRIGLAIGTNSIGWGVIELSWNKDRERYEKVRIVDQGVRMFDRAEMPKTGASLAEPRRIARSSRRRLNRKSQRKKNIRNLLVQHGVITQEELDSLYPLSKKSMDIWGIRLDGLDRLLNHFEWARLLIHLAQRRGFKSNRKSELKDTETGKVLSSIQLNEKRLSLYRTVGEMWMKDPDFSKYDRKRNSPNEYVFSVSRAELEKEIVTLFAAQRRFQSPYASKDLQETYLQIWTHQLPFASGNAILNKVGYCSLLKGKERRIPKATYTFQYFSALDQVNRTRLGPDFQPFTKEQREIILNNMFQRTDYYKKKTIPEVTYYDIRKWLELDETIQFKGLNYDPNEELKKIEKKPFINLKAFYEINKVVANYSERTNETFSTLDYDGIGYALTVYKTDKDIRSYLKSSHNLPKRCYDDQLIEELLSLSYTKFGHLSLKAINHVLSIMQKGNTYKEAVDQLGYDTSGLKKEKRSKFLPPISDEITNPIVKRALTQARKVVNAIIRRHGSPHSVHIELARELSKNHDERTKIVSAQDENYKKNKGAISILSEHGILNPTGYDIVRYKLWKEQGERCAYSLKEIPADTFFNELKKERNGAPILEVDHILPYSQSFIDSYHNKVLVYSDENRKKGNRIPYTYFLETNKDWEAFERYVRSNKFFSKKKREYLLKRAYLPRESELIKERHLNDTRYASTFLKNFIEQNLQFKEAEDNPRKRRVQTVNGVITAHFRKRWGLEKDRQETYLHHAMDAIIVACTDHHMVTRVTEYYQIKESNKSVKKPYFPMPWEGFRDELLSHLASQPIAKKISEELKAGYQSLDYIFVSRMPKRSITGAAHKQTIMRKGGIDKKGKTIIIERLHLKDIKFDENGDFKMVGKEQDMATYEAIKQRYLEHGKNSKKAFETPLYKPSKKGTGNLIKRVKVEGQAKSFVREVNGGVAQNGDLVRVDLFEKDDKYYMVPIYVPDTVCSELPKKVVASSKGYEQWLTLDNSFTFKFSLYPYDLVRLVKGDEDRFLYFGTLDIDSDRLNFKDVNKPSKKNEYRYSLKTIEDLEKYEVGVLGDLRLVRKETRRNFHSGGSGGSGGSMKTTTQELKQYITRLFQLSNNETWECEALEEAAENILPERFINNSLLAHLTLNTYTYYNDELHELSIYPFLMYANDQLISIGYLDHFDMDFLYLTDTKNTIIDERHLLKQGENNHESGGSKRPAATKKAGQAKKKK

SEQ ID NO: 25 - DNA, 20 bp, Homo sapiens
cacatctcgagcaagacgtt

SEQ ID NO: 26 - DNA, 20 bp, Homo sapiens
cttctatagcctccttcccc

SEQ ID NO: 27 - DNA, 25 bp, Homo sapiens
atctggagggaacttacagcatatg

SEQ ID NO: 28 - DNA, 25 bp, Homo sapiens
atattttctttaatggtgccaggca

SEQ ID NO: 29 - DNA, 25 bp, Homo sapiens
ggccaaaatccagctgccttccttg

SEQ ID NO: 30 - DNA, 20 bp, Homo sapiens
catggcagtacattagagca

SEQ ID NO: 31 - DNA, 20 bp, Homo sapiens
ggacagtgcgcatctccctg

SEQ ID NO: 32 - DNA, 20 bp, Homo sapiens
gccgcacagcattcaggtcg

SEQ ID NO: 33 - DNA, 25 bp, Homo sapiens
gaacaactcaaatggaaatgaatat

SEQ ID NO: 34 - DNA, 130 bp, Artificial Sequence
  source: /note="Description of Artificial Sequence: Synthetic polynucleotide"
cacatctcgagcaagacgttgtcatagttccattaaagccaaaagtggctttgatgtttctatgataagggtttcgacccgtggcgtcggggatcgcctgcccattgaaatgggcttctccccatttatt

SEQ ID NO: 35 - DNA, 130 bp, Artificial Sequence
  source: /note="Description of Artificial Sequence: Synthetic polynucleotide"
cttctatagcctccttccccgtcatagttccattaaagccaaaagtggctttgatgtttctatgataagggtttcgacccgtggcgtcggggatcgcctgcccattgaaatgggcttctccccatttatt

SEQ ID NO: 36 - DNA, 135 bp, Artificial Sequence
  source: /note="Description of Artificial Sequence: Synthetic polynucleotide"
atctggagggaacttacagcatatggtcatagttccatgaaagccaaaagtggctttgatgtttctatgataagggtttcggcccgtggcgtcggggatcgcctgcccattccgatgggcttctccccatttatt

SEQ ID NO: 37 - DNA, 130 bp, Artificial Sequence
  source: /note="Description of Artificial Sequence: Synthetic polynucleotide"
atattttctttaatggtgccaggcagtcatagttccattaaagccaaaagtggctttgatgtttctatgataagggtttcgacccgtggcgtcggggatcgcctgcccattgaaatgggcttctccccat

SEQ ID NO: 38 - DNA, 135 bp, Artificial Sequence
  source: /note="Description of Artificial Sequence: Synthetic polynucleotide"
ggccaaaatccagctgccttccttggtcatagttccatgaaagccaaaagtggctttgatgtttctatgataagggtttcggcccgtggcgtcggggatcgcctgcccattccgatgggcttctccccatttatt

SEQ ID NO: 39 - DNA, 130 bp, Artificial Sequence
  source: /note="Description of Artificial Sequence: Synthetic polynucleotide"
catggcagtacattagagcagtcatagttccattaaagccaaaagtggctttgatgtttctatgataagggtttcgacccgtggcgtcggggatcgcctgcccattgaaatgggcttctccccatttatt

SEQ ID NO: 40 - DNA, 130 bp, Artificial Sequence
  source: /note="Description of Artificial Sequence: Synthetic polynucleotide"
ggacagtgcgcatctccctggtcatagttccattaaagccaaaagtggctttgatgtttctatgataagggtttcgacccgtggcgtcggggatcgcctgcccattgaaatgggcttctccccatttatt

SEQ ID NO: 41 - DNA, 130 bp, Artificial Sequence
  source: /note="Description of Artificial Sequence: Synthetic polynucleotide"
gccgcacagcattcaggtcggtcatagttccattaaagccaaaagtggctttgatgtttctatgataagggtttcgacccgtggcgtcggggatcgcctgcccattgaaatgggcttctccccatttatt

SEQ ID NO: 42 - DNA, 135 bp, Artificial Sequence
  source: /note="Description of Artificial Sequence: Synthetic polynucleotide"
gaacaactcaaatggaaatgaatatgtcatagttccatgaaagccaaaagtggctttgatgtttctatgataagggtttcggcccgtggcgtcggggatcgcctgcccattccgatgggcttctccccatttatt

SEQ ID NO: 43 - DNA, 53 bp, Artificial Sequence
  source: /note="Description of Artificial Sequence: Synthetic oligonucleotide"
tcgtcggcagcgtcagatgtgtataagagacaggttcactccagcctcaacat

SEQ ID NO: 44 - DNA, 53 bp, Artificial Sequence
  source: /note="Description of Artificial Sequence: Synthetic oligonucleotide"
tcgtcggcagcgtcagatgtgtataagagacaggcagtataactggccagcct

SEQ ID NO: 45 - DNA, 53 bp, Artificial Sequence
  source: /note="Description of Artificial Sequence: Synthetic oligonucleotide"
tcgtcggcagcgtcagatgtgtataagagacagaatgaagccaggcaagagca

SEQ ID NO: 46 - DNA, 55 bp, Artificial Sequence
  source: /note="Description of Artificial Sequence: Synthetic oligonucleotide"
tcgtcggcagcgtcagatgtgtataagagacagtgcatagcagagtacctgaaac

SEQ ID NO: 47 - DNA, 53 bp, Artificial Sequence
  source: /note="Description of Artificial Sequence: Synthetic oligonucleotide"
tcgtcggcagcgtcagatgtgtataagagacagacccggcctgcttttcttaa

SEQ ID NO: 48 - DNA, 52 bp, Artificial Sequence
  source: /note="Description of Artificial Sequence: Synthetic oligonucleotide"
tcgtcggcagcgtcagatgtgtataagagacagacatttgacgagcagcgaa

SEQ ID NO: 49 - DNA, 53 bp, Artificial Sequence
  source: /note="Description of Artificial Sequence: Synthetic oligonucleotide"
tcgtcggcagcgtcagatgtgtataagagacagtggcccctatgtggagatca

SEQ ID NO: 50 - DNA, 53 bp, Artificial Sequence
  source: /note="Description of Artificial Sequence: Synthetic oligonucleotide"
tcgtcggcagcgtcagatgtgtataagagacagatgacattcaggccacagtg

SEQ ID NO: 51 - DNA, 53 bp, Artificial Sequence
  source: /note="Description of Artificial Sequence: Synthetic oligonucleotide"
tcgtcggcagcgtcagatgtgtataagagacaggacagccaagaggttttgcc

SEQ ID NO: 52 - DNA, 54 bp, Artificial Sequence
  source: /note="Description of Artificial Sequence: Synthetic oligonucleotide"
gtctcgtgggctcggagatgtgtataagagacaggtaatccagcaggtcagcaa

SEQ ID NO: 53 - DNA, 56 bp, Artificial Sequence
  source: /note="Description of Artificial Sequence: Synthetic oligonucleotide"
gtctcgtgggctcggagatgtgtataagagacagtcagttgaggagttcagcttaa

SEQ ID NO: 54 - DNA, 54 bp, Artificial Sequence
  source: /note="Description of Artificial Sequence: Synthetic oligonucleotide"
gtctcgtgggctcggagatgtgtataagagacagctgtgcaaacccaggctaga

SEQ ID NO: 55 - DNA, 55 bp, Artificial Sequence
  source: /note="Description of Artificial Sequence: Synthetic oligonucleotide"
gtctcgtgggctcggagatgtgtataagagacagcatgctttgatgacgcttctg

SEQ ID NO: 56 - DNA, 54 bp, Artificial Sequence
  source: /note="Description of Artificial Sequence: Synthetic oligonucleotide"
gtctcgtgggctcggagatgtgtataagagacagggcagcgaggcatacatagt

SEQ ID NO: 57 - DNA, 54 bp, Artificial Sequence
  source: /note="Description of Artificial Sequence: Synthetic oligonucleotide"
gtctcgtgggctcggagatgtgtataagagacagggcccctggagaggttttaa

SEQ ID NO: 58 - DNA, 54 bp, Artificial Sequence
  source: /note="Description of Artificial Sequence: Synthetic oligonucleotide"
gtctcgtgggctcggagatgtgtataagagacagggcagagctcagcctcatag

SEQ ID NO: 59 - DNA, 54 bp, Artificial Sequence
  source: /note="Description of Artificial Sequence: Synthetic oligonucleotide"
gtctcgtgggctcggagatgtgtataagagacagcttcctcctattcaggccca

SEQ ID NO: 60 - DNA, 54 bp, Artificial Sequence
  source: /note="Description of Artificial Sequence: Synthetic oligonucleotide"
gtctcgtgggctcggagatgtgtataagagacagctgtcccttgcagcttctgt

SEQ ID NO: 61 - DNA, 20 bp, Homo sapiens
gggggtcggggctcgcggcg

SEQ ID NO: 62 - DNA, 110 bp, Artificial Sequence
  source: /note="Description of Artificial Sequence: Synthetic polynucleotide"
gggggtcggggctcgcggcggttattgtactctcaataaaaagttattgagaatctacaataataaggcatcttgccgaatttaccgccctacatatgtagggcggtttt

SEQ ID NO: 63 - DNA, 53 bp, Artificial Sequence
  source: /note="Description of Artificial Sequence: Synthetic oligonucleotide"
tcgtcggcagcgtcagatgtgtataagagacaggcaaagtgagtgacctgctt

SEQ ID NO: 64 - DNA, 52 bp, Artificial Sequence
  source: /note="Description of Artificial Sequence: Synthetic oligonucleotide"
gtctcgtgggctcggagatgtgtataagagacaggagctagcacttctcgcg

SEQ ID NO: 65 - protein, 1384 aa, Artificial Sequence
  source: /note="Description of Artificial Sequence: Synthetic polypeptide"
MAPKKKRKVDYKDHDGDYKDHDIDYKDDDDKMRELDYRIGLAIGTNSIGWGVIELSWNKDRERYEKVRIVDQGVRMFDRAEMPKTGASLAEPRRIARSSRRRLNRKSQRKKNIRNLLVQHGVITQEELDSLYPLSKKSMDIWGIRLDGLDRLLNHFEWARLLIHLAQRRGFKSNRKSELKDTETGKVLSSIQLNEKRLSLYRTVGEMWMKDPDFSKYDRKRNSPNEYVFSVSRAELEKEIVTLFAAQRRFQSPYASKDLQETYLQIWTHQLPFASGNAILNKVGYCSLLKGKERRIPKATYTFQYFSALDQVNRTRLGPDFQPFTKEQREIILNNMFQRTDYYKKKTIPEVTYYDIRKWLELDETIQFKGLNYDPNEELKKIEKKPFINLKAFYEINKVVANYSERTNETFSTLDYDGIGYALTVYKTDKDIRSYLKSSHNLPKRCYDDQLIEELLSLSYTKFGHLSLKAINHVLSIMQKGNTYKEAVDQLGYDTSGLKKEKRSKFLPPISDEITNPIVKRALTQARKVVNAIIRRHGSPHSVHIELARELSKNHDERTKIVSAQDENYKKNKGAISILSEHGILNPTGYDIVRYKLWKEQGERCAYSLKEIPADTFFNELKKERNGAPILEVDHILPYSQSFIDSYHNKVLVYSDENRKKGNRIPYTYFLETNKDWEAFERYVRSNKFFSKKKREYLLKRAYLPRESELIKERHLNDTRYASTFLKNFIEQNLQFKEAEDNPRKRRVQTVNGVITAHFRKRWGLEKDRQETYLHHAMDAIIVACTDHHMVTRVTEYYQIKESNKSVKKPYFPMPWEGFRDELLSHLASQPIAKKISEELKAGYQSLDYIFVSRMPKRSITGAAHKQTIMRKGGIDKKGKTIIIERLHLKDIKFDENGDFKMVGKEQDMATYEAIKQRYLEHGKNSKKAFETPLYKPSKKGTGNLIKRVKVEGQAKSFVREVNGGVAQNGDLVRVDLFEKDDKYYMVPIYVPDTVCSELPKKVVASSKGYEQWLTLDNSFTFKFSLYPYDLVRLVKGDEDRFLYFGTLDIDSDRLNFKDVNKPSKKNEYRYSLKTIEDLEKYEVGVLGDLRLVRKETRRNFHSGGSSGGSSGSETPGTSESATPESSGGSSGGSMAAGPAPEARSLMDEQTFLDNFNNLKYPRKTYLCYEVELLVGENHIPLDDYKGFVHNEGFDMGLERCHAELIFLERMASWNLDTELRYRITVFISWSPCPECADELVKFLRENRHVNLRIFAARIYDWYQGYEAGLRALKAAGAEVAMMTLHEFEYCWNNFVDHQQDEDTPFPPWDNLVARSEELSQRLEGILQPSVLVFCWPSQVSVTAAHSDIMSQASRAWEKRRDPPSGGSKRPAATKKAGQAKKKK

SEQ ID NO: 66 - protein, 1355 aa, Artificial Sequence
  source: /note="Description of Artificial Sequence: Synthetic polypeptide"
MAPKKKRKVDYKDHDGDYKDHDIDYKDDDDKMRELDYRIGLAIGTNSIGWGVIELSWNKDRERYEKVRIVDQGVRMFDRAEMPKTGASLAEPRRIARSSRRRLNRKSQRKKNIRNLLVQHGVITQEELDSLYPLSKKSMDIWGIRLDGLDRLLNHFEWARLLIHLAQRRGFKSNRKSELKDTETGKVLSSIQLNEKRLSLYRTVGEMWMKDPDFSKYDRKRNSPNEYVFSVSRAELEKEIVTLFAAQRRFQSPYASKDLQETYLQIWTHQLPFASGNAILNKVGYCSLLKGKERRIPKATYTFQYFSALDQVNRTRLGPDFQPFTKEQREIILNNMFQRTDYYKKKTIPEVTYYDIRKWLELDETIQFKGLNYDPNEELKKIEKKPFINLKAFYEINKVVANYSERTNETFSTLDYDGIGYALTVYKTDKDIRSYLKSSHNLPKRCYDDQLIEELLSLSYTKFGHLSLKAINHVLSIMQKGNTYKEAVDQLGYDTSGLKKEKRSKFLPPISDEITNPIVKRALTQARKVVNAIIRRHGSPHSVHIELARELSKNHDERTKIVSAQDENYKKNKGAISILSEHGILNPTGYDIVRYKLWKEQGERCAYSLKEIPADTFFNELKKERNGAPILEVDHILPYSQSFIDSYHNKVLVYSDENRKKGNRIPYTYFLETNKDWEAFERYVRSNKFFSKKKREYLLKRAYLPRESELIKERHLNDTRYASTFLKNFIEQNLQFKEAEDNPRKRRVQTVNGVITAHFRKRWGLEKDRQETYLHHAMDAIIVACTDHHMVTRVTEYYQIKESNKSVKKPYFPMPWEGFRDELLSHLASQPIAKKISEELKAGYQSLDYIFVSRMPKRSITGAAHKQTIMRKGGIDKKGKTIIIERLHLKDIKFDENGDFKMVGKEQDMATYEAIKQRYLEHGKNSKKAFETPLYKPSKKGTGNLIKRVKVEGQAKSFVREVNGGVAQNGDLVRVDLFEKDDKYYMVPIYVPDTVCSELPKKVVASSKGYEQWLTLDNSFTFKFSLYPYDLVRLVKGDEDRFLYFGTLDIDSDRLNFKDVNKPSKKNEYRYSLKTIEDLEKYEVGVLGDLRLVRKETRRNFHSGGSSGGSSGSETPGTSESATPESSGGSSGGSMEASPASRPRPLMDPHMFTGNFTNNPRVFGLHQTYLCYEVKRQGPDGTRDLMNEQRDFLCNQAKNHFSGSEDHHAERCFLDRIPSWQLDPAQTYRVTCFISWSPCFSCAQEVAEFLHENPHVNLRIFAARIYDYLPRYEEGLQMLQNAGAQVSIMTSEEFGHCWDTFVDRQGHPFQPWEGLDEHSQALSGRLQAILQNQGNSGGSKRPAATKKAGQAKKKK

SEQ ID NO: 67 - protein, 1510 aa, Artificial Sequence
  source: /note="Description of Artificial Sequence: Synthetic polypeptide"
MAPKKKRKVDYKDHDGDYKDHDIDYKDDDDKMAAGPAPEARSLMDEQTFLDNFNNLKYPRKTYLCYEVELLVGENHIPLDDYKGFVHNEGFDMGLERCHAELIFLERMASWNLDTELRYRITVFISWSPCPECADELVKFLRENRHVNLRIFAARIYDWYQGYEAGLRALKAAGAEVAMMTLHEFEYCWNNFVDHQQDEDTPFPPWDNLVARSEELSQRLEGILQPSVLVFCWPSQVSVTAAHSDIMSQASRAWEKRRDPPSGGSSGGSSGSETPGTSESATPESSGGSSGGSMRELDYRIGLAIGTNSIGWGVIELSWNKDRERYEKVRIVDQGVRMFDRAEMPKTGASLAEPRRIARSSRRRLNRKSQRKKNIRNLLVQHGVITQEELDSLYPLSKKSMDIWGIRLDGLDRLLNHFEWARLLIHLAQRRGFKSNRKSELKDTETGKVLSSIQLNEKRLSLYRTVGEMWMKDPDFSKYDRKRNSPNEYVFSVSRAELEKEIVTLFAAQRRFQSPYASKDLQETYLQIWTHQLPFASGNAILNKVGYCSLLKGKERRIPKATYTFQYFSALDQVNRTRLGPDFQPFTKEQREIILNNMFQRTDYYKKKTIPEVTYYDIRKWLELDETIQFKGLNYDPNEELKKIEKKPFINLKAFYEINKVVANYSERTNETFSTLDYDGIGYALTVYKTDKDIRSYLKSSHNLPKRCYDDQLIEELLSLSYTKFGHLSLKAINHVLSIMQKGNTYKEAVDQLGYDTSGLKKEKRSKFLPPISDEITNPIVKRALTQARKVVNAIIRRHGSPHSVHIELARELSKNHDERTKIVSAQDENYKKNKGAISILSEHGILNPTGYDIVRYKLWKEQGERCAYSLKEIPADTFFNELKKERNGAPILEVDHILPYSQSFIDSYHNKVLVYSDENRKKGNRIPYTYFLETNKDWEAFERYVRSNKFFSKKKREYLLKRAYLPRESELIKERHLNDTRYASTFLKNFIEQNLQFKEAEDNPRKRRVQTVNGVITAHFRKRWGLEKDRQETYLHHAMDAIIVACTDHHMVTRVTEYYQIKESNKSVKKPYFPMPWEGFRDELLSHLASQPIAKKISEELKAGYQSLDYIFVSRMPKRSITGAAHKQTIMRKGGIDKKGKTIIIERLHLKDIKFDENGDFKMVGKEQDMATYEAIKQRYLEHGKNSKKAFETPLYKPSKKGTGNLIKRVKVEGQAKSFVREVNGGVAQNGDLVRVDLFEKDDKYYMVPIYVPDTVCSELPKKVVASSKGYEQWLTLDNSFTFKFSLYPYDLVRLVKGDEDRFLYFGTLDIDSDRLNFKDVNKPSKKNEYRYSLKTIEDLEKYEVGVLGDLRLVRKETRRNFHSGGSGGSGGSMKTTTQELKQYITRLFQLSNNETWECEALEEAAENILPERFINNSLLAHLTLNTYTYYNDELHELSIYPFLMYANDQLISIGYLDHFDMDFLYLTDTKNTIIDERHLLKQGENNHESGGSKRPAATKKAGQAKKKK

SEQ ID NO: 68 - protein, 1481 aa, Artificial Sequence
  source: /note="Description of Artificial Sequence: Synthetic polypeptide"
MAPKKKRKVDYKDHDGDYKDHDIDYKDDDDKMEASPASRPRPLMDPHMFTGNFTNNPRVFGLHQTYLCYEVKRQGPDGTRDLMNEQRDFLCNQAKNHFSGSEDHHAERCFLDRIPSWQLDPAQTYRVTCFISWSPCFSCAQEVAEFLHENPHVNLRIFAARIYDYLPRYEEGLQMLQNAGAQVSIMTSEEFGHCWDTFVDRQGHPFQPWEGLDEHSQALSGRLQAILQNQGNSGGSSGGSSGSETPGTSESATPESSGGSSGGSMRELDYRIGLAIGTNSIGWGVIELSWNKDRERYEKVRIVDQGVRMFDRAEMPKTGASLAEPRRIARSSRRRLNRKSQRKKNIRNLLVQHGVITQEELDSLYPLSKKSMDIWGIRLDGLDRLLNHFEWARLLIHLAQRRGFKSNRKSELKDTETGKVLSSIQLNEKRLSLYRTVGEMWMKDPDFSKYDRKRNSPNEYVFSVSRAELEKEIVTLFAAQRRFQSPYASKDLQETYLQIWTHQLPFASGNAILNKVGYCSLLKGKERRIPKATYTFQYFSALDQVNRTRLGPDFQPFTKEQREIILNNMFQRTDYYKKKTIPEVTYYDIRKWLELDETIQFKGLNYDPNEELKKIEKKPFINLKAFYEINKVVANYSERTNETFSTLDYDGIGYALTVYKTDKDIRSYLKSSHNLPKRCYDDQLIEELLSLSYTKFGHLSLKAINHVLSIMQKGNTYKEAVDQLGYDTSGLKKEKRSKFLPPISDEITNPIVKRALTQARKVVNAIIRRHGSPHSVHIELARELSKNHDERTKIVSAQDENYKKNKGAISILSEHGILNPTGYDIVRYKLWKEQGERCAYSLKEIPADTFFNELKKERNGAPILEVDHILPYSQSFIDSYHNKVLVYSDENRKKGNRIPYTYFLETNKDWEAFERYVRSNKFFSKKKREYLLKRAYLPRESELIKERHLNDTRYASTFLKNFIEQNLQFKEAEDNPRKRRVQTVNGVITAHFRKRWGLEKDRQETYLHHAMDAIIVACTDHHMVTRVTEYYQIKESNKSVKKPYFPMPWEGFRDELLSHLASQPIAKKISEELKAGYQSLDYIFVSRMPKRSITGAAHKQTIMRKGGIDKKGKTIIIERLHLKDIKFDENGDFKMVGKEQDMATYEAIKQRYLEHGKNSKKAFETPLYKPSKKGTGNLIKRVKVEGQAKSFVREVNGGVAQNGDLVRVDLFEKDDKYYMVPIYVPDTVCSELPKKVVASSKGYEQWLTLDNSFTFKFSLYPYDLVRLVKGDEDRFLYFGTLDIDSDRLNFKDVNKPSKKNEYRYSLKTIEDLEKYEVGVLGDLRLVRKETRRNFHSGGSGGSGGSMKTTTQELKQYITRLFQLSNNETWECEALEEAAENILPERFINNSLLAHLTLNTYTYYNDELHELSIYPFLMYANDQLISIGYLDHFDMDFLYLTDTKNTIIDERHLLKQGENNHESGGSKRPAATKKAGQAKKKK

SEQ ID NO: 69 - protein, 1355 aa, Artificial Sequence
  source: /note="Description of Artificial Sequence: Synthetic polypeptide"
MAPKKKRKVDYKDHDGDYKDHDIDYKDDDDKMEASPASRPRPLMDPHMFTGNFTNNPRVFGLHQTYLCYEVKRQGPDGTRDLMNEQRDFLCNQAKNHFSGSEDHHAERCFLDRIPSWQLDPAQTYRVTCFISWSPCFSCAQEVAEFLHENPHVNLRIFAARIYDYLPRYEEGLQMLQNAGAQVSIMTSEEFGHCWDTFVDRQGHPFQPWEGLDEHSQALSGRLQAILQNQGNSGGSSGGSSGSETPGTSESATPESSGGSSGGSMRELDYRIGLAIGTNSIGWGVIELSWNKDRERYEKVRIVDQGVRMFDRAEMPKTGASLAEPRRIARSSRRRLNRKSQRKKNIRNLLVQHGVITQEELDSLYPLSKKSMDIWGIRLDGLDRLLNHFEWARLLIHLAQRRGFKSNRKSELKDTETGKVLSSIQLNEKRLSLYRTVGEMWMKDPDFSKYDRKRNSPNEYVFSVSRAELEKEIVTLFAAQRRFQSPYASKDLQETYLQIWTHQLPFASGNAILNKVGYCSLLKGKERRIPKATYTFQYFSALDQVNRTRLGPDFQPFTKEQREIILNNMFQRTDYYKKKTIPEVTYYDIRKWLELDETIQFKGLNYDPNEELKKIEKKPFINLKAFYEINKVVANYSERTNETFSTLDYDGIGYALTVYKTDKDIRSYLKSSHNLPKRCYDDQLIEELLSLSYTKFGHLSLKAINHVLSIMQKGNTYKEAVDQLGYDTSGLKKEKRSKFLPPISDEITNPIVKRALTQARKVVNAIIRRHGSPHSVHIELARELSKNHDERTKIVSAQDENYKKNKGAISILSEHGILNPTGYDIVRYKLWKEQGERCAYSLKEIPADTFFNELKKERNGAPILEVDHILPYSQSFIDSYHNKVLVYSDENRKKGNRIPYTYFLETNKDWEAFERYVRSNKFFSKKKREYLLKRAYLPRESELIKERHLNDTRYASTFLKNFIEQNLQFKEAEDNPRKRRVQTVNGVITAHFRKRWGLEKDRQETYLHHAMDAIIVACTDHHMVTRVTEYYQIKESNKSVKKPYFPMPWEGFRDELLSHLASQPIAKKISEELKAGYQSLDYIFVSRMPKRSITGAAHKQTIMRKGGIDKKGKTIIIERLHLKDIKFDENGDFKMVGKEQDMATYEAIKQRYLEHGKNSKKAFETPLYKPSKKGTGNLIKRVKVEGQAKSFVREVNGGVAQNGDLVRVDLFEKDDKYYMVPIYVPDTVCSELPKKVVASSKGYEQWLTLDNSFTFKFSLYPYDLVRLVKGDEDRFLYFGTLDIDSDRLNFKDVNKPSKKNEYRYSLKTIEDLEKYEVGVLGDLRLVRKETRRNFHSGGSKRPAATKKAGQAKKKK

SEQ ID NO: 70 - DNA, 25 bp, Homo sapiens
gcttctactcttggcttacaaccca

SEQ ID NO: 71 - DNA, 135 bp, Artificial Sequence
  source: /note="Description of Artificial Sequence: Synthetic polynucleotide"
gcttctactcttggcttacaacccagtcatagttccatgaaagccaaaagtggctttgatgtttctatgataagggtttcggcccgtggcgtcggggatcgcctgcccattccgatgggcttctccccatttatt

SEQ ID NO: 72 - DNA, 53 bp, Artificial Sequence; identical to SEQ ID NO: 47
  source: /note="Description of Artificial Sequence: Synthetic oligonucleotide"

SEQ ID NO: 73 - DNA, 54 bp, Artificial Sequence; identical to SEQ ID NO: 56
  source: /note="Description of Artificial Sequence: Synthetic oligonucleotide"

SEQ ID NO: 74 - protein, 1070 aa, Bacillus sp.
MRELDYRIGLDIGTNSIGWGVIELSWNKDRERYEKVRIVDQGVRMFDRAEMPKTGASLAEPRRIARSSRRRLNRKSQRKKNIRNLLVQHGVITQEELDSLYPLSKKSMDIWGIRLDGLDRLLNHFEWARLLIHLAQRRGFKSNRKSELKDTETGKVLSSIQLNEKRLSLYRTVGEMWMKDPDFSKYDRKRNSPNEYVFSVSRAELEKEIVTLFAAQRRFQSPYASKDLQETYLQIWTHQLPFASGNAILNKVGYCSLLKGKERRIPKATYTFQYFSALDQVNRTRLGPDFQPFTKEQREIILNNMFQRTDYYKKKTIPEVTYYDIRKWLELDETIQFKGLNYDPNEELKKIEKKPFINLKAFYEINKVVANYSERTNETFSTLDYDGIGYALTVYKTDKDIRSYLKSSHNLPKRCYDDQLIEELLSLSYTKFGHLSLKAINHVLSIMQKGNTYKEAVDQLGYDTSGLKKEKRSKFLPPISDEITNPIVKRALTQARKVVNAIIRRHGSPHSVHIELARELSKNHDERTKIVSAQDENYKKNKGAISILSEHGILNPTGYDIVRYKLWKEQGERCAYSLKEIPADTFFNELKKERNGAPILEVDHILPYSQSFIDSYHNKVLVYSDENRKKGNRIPYTYFLETNKDWEAFERYVRSNKFFSKKKREYLLKRAYLPRESELIKERHLNDTRYASTFLKNFIEQNLQFKEAEDNPRKRRVQTVNGVITAHFRKRWGLEKDRQETYLHHAMDAIIVACTDHHMVTRVTEYYQIKESNKSVKKPYFPMPWEGFRDELLSHLASQPIAKKISEELKAGYQSLDYIFVSRMPKRSITGAAHKQTIMRKGGIDKKGKTIIIERLHLKDIKFDENGDFKMVGKEQDMATYEAIKQRYLEHGKNSKKAFETPLYKPSKKGTGNLIKRVKVEGQAKSFVREVNGGVAQNGDLVRVDLFEKDDKYYMVPIYVPDTVCSELPKKVVASSKGYEQWLTLDNSFTFKFSLYPYDLVRLVKGDEDRFLYFGTLDIDSDRLNFKDVNKPSKKNEYRYSLKTIEDLEKYEVGVLGDLRVRKETRRNFH

SEQ ID NO: 75 - protein, 1071 aa, Artificial Sequence
  source: /note="Description of Artificial Sequence: Synthetic polypeptide"
MRELDYRIGLAIGTNSIGWGVIELSWNKDRERYEKVRIVDQGVRMFDRAEMPKTGASLAEPRRIARSSRRRLNRKSQRKKNIRNLLVQHGVITQEELDSLYPLSKKSMDIWGIRLDGLDRLLNHFEWARLLIHLAQRRGFKSNRKSELKDTETGKVLSSIQLNEKRLSLYRTVGEMWMKDPDFSKYDRKRNSPNEYVFSVSRAELEKEIVTLFAAQRRFQSPYASKDLQETYLQIWTHQLPFASGNAILNKVGYCSLLKGKERRIPKATYTFQYFSALDQVNRTRLGPDFQPFTKEQREIILNNMFQRTDYYKKKTIPEVTYYDIRKWLELDETIQFKGLNYDPNEELKKIEKKPFINLKAFYEINKVVANYSERTNETFSTLDYDGIGYALTVYKTDKDIRSYLKSSHNLPKRCYDDQLIEELLSLSYTKFGHLSLKAINHVLSIMQKGNTYKEAVDQLGYDTSGLKKEKRSKFLPPISDEITNPIVKRALTQARKVVNAIIRRHGSPHSVHIELARELSKNHDERTKIVSAQDENYKKNKGAISILSEHGILNPTGYDIVRYKLWKEQGERCAYSLKEIPADTFFNELKKERNGAPILEVDHILPYSQSFIDSYHNKVLVYSDENRKKGNRIPYTYFLETNKDWEAFERYVRSNKFFSKKKREYLLKRAYLPRESELIKERHLNDTRYASTFLKNFIEQNLQFKEAEDNPRKRRVQTVNGVITAHFRKRWGLEKDRQETYLHHAMDAIIVACTDHHMVTRVTEYYQIKESNKSVKKPYFPMPWEGFRDELLSHLASQPIAKKISEELKAGYQSLDYIFVSRMPKRSITGAAHKQTIMRKGGIDKKGKTIIIERLHLKDIKFDENGDFKMVGKEQDMATYEAIKQRYLEHGKNSKKAFETPLYKPSKKGTGNLIKRVKVEGQAKSFVREVNGGVAQNGDLVRVDLFEKDDKYYMVPIYVPDTVCSELPKKVVASSKGYEQWLTLDNSFTFKFSLYPYDLVRLVKGDEDRFLYFGTLDIDSDRLNFKDVNKPSKKNEYRYSLKTIEDLEKYEVGVLGDLRLVRKETRRNFH

SEQ ID NO: 76 - protein, 7 aa, Artificial Sequence
  source: /note="Description of Artificial Sequence: Synthetic peptide"
PKKKRKV

SEQ ID NO: 77 - protein, 22 aa, Artificial Sequence
  source: /note="Description of Artificial Sequence: Synthetic peptide"
DYKDHDGDYKDHDIDYKDDDDK

SEQ ID NO: 78 - protein, 16 aa, Artificial Sequence
  source: /note="Description of Artificial Sequence: Synthetic peptide"
SGSETPGTSESATPES

SEQ ID NO: 79 - protein, 32 aa, Artificial Sequence
  source: /note="Description of Artificial Sequence: Synthetic polypeptide"
SGGSSGGSSGSETPGTSESATPESSGGSSGGS

SEQ ID NO: 80 - protein, 16 aa, Artificial Sequence
  source: /note="Description of Artificial Sequence: Synthetic peptide"
KRPAATKKAGQAKKKK

SEQ ID NO: 81 - protein, 116 aa, Artificial Sequence
  source: /note="Description of Artificial Sequence: Synthetic polypeptide"
MKTTTQELKQYITRLFQLSNNETWECEALEEAAENILPERFINNSLLAHLTLNTYTYYNDELHELSIYPFLMYANDQLISIGYLDHFDMDFLYLTDTKNTIIDERHLLKQGENNHE

SEQ ID NO: 82 - protein, 1150 aa, Enterococcus sp.
MYSIGLDLGISSVGWSVIDEETGKIVDLGIRLFSAKNSEKNLERRTSRGARRLIRRKTNRLKDAKKLLEAIGFYEDKALKNVCPYQLRVKGLTEGLTKGELYKVVLHIVKKRGISYLDEDDAEAAKESQDYKEQVRKNAQLLTKYTPGQIQLQRLKENNRVKTGINGQGHYQLNVFKVSAYADELATILKTQQALYPNELTDDWIALFVQPGIAENAGLIYRKRPYYHGPGNEANNSPYGRWSDFQKTGQPAANIFDKLIGKDFQGELRASGLSLSAQQYNLLNDLTNLKIDGEVSLSPTQKEFILTELMTKEFARFGVNDIAKLLGVKKEQLSGWRLDKKGKPEIHTLKGYRNWRKIFAESGIDLATLPTETIDCLAKVLTLNTEREGVENTLAFELPELAEPVKLLVLDRYKELSQSVSTQAWHRFSLKTLHLLIPELIKSTSEQNTLLEQFQLKADVRKRYSDYKKLPTKEVLTEIYNPTVNKTVSQAFKVMDALLEKYGKDQIHYITVEMPRDDNEEEERKRIKELQTKNSQRKNDSQQYFLQKSGWSQEKFQATIHKNRRFLAKLLYYFEQDGVCAYTGNPISPELLVSDSTEIDHIIPISISLDDSINNKVLVLSHANQVKGQQTPYDARMAGAFNKINGKFSNWDEYQKWVESCPFSRKKVNNLLETRNIFDSEQVQKFLSRNLNDTRYASRLVLNTLQSFFENQDTIVRVVNGSFTHTLRKKWGADLDKTRETHHHHAVDATLCAVTPFVKVSRYHYAVNEETGEKFMREIDVETGEILDEIPYREYKKAKHYERKTYQVKWSNFREQLKPITIHPKIKFSHQVDRKANRKLSDATIYSVREKTEVKTLKSGKEKITTDEYTIGKIKDIYTVDGWEAFKKKQDKLLMKEFDEKTYELLVTIAATTPDFQEVEEKNGKVKRVKRSPFAVYCEENGIPAIRKYAKKNNGPVIRSLKYYDGKLNKHINITKDEKGRPVEQTKNGRKVTLQSLKPYRYDIYQDLETKAYYTVQLYYSDLRFVEGEYGITEKEYMKKVAEQTKGQVVRFCFSLQKNDGLEIEWKDSQRYDVRFYNFQSANSINFKGLEQEMIPAENQFKQKPYNNGAINLNIAKYGKEGNKLRKFNTDILGKKHHLSYEKEPKNIIK

SEQ ID NO: 83 - protein, 1150 aa, Artificial Sequence
  source: /note="Description of Artificial Sequence: Synthetic polypeptide"
MYSIGLALGISSVGWSVIDEETGKIVDLGIRLFSAKNSEKNLERRTSRGARRLIRRKTNRLKDAKKLLEAIGFYEDKALKNVCPYQLRVKGLTEGLTKGELYKVVLHIVKKRGISYLDEDDAEAAKESQDYKEQVRKNAQLLTKYTPGQIQLQRLKENNRVKTGINGQGHYQLNVFKVSAYADELATILKTQQALYPNELTDDWIALFVQPGIAENAGLIYRKRPYYHGPGNEANNSPYGRWSDFQKTGQPAANIFDKLIGKDFQGELRASGLSLSAQQYNLLNDLTNLKIDGEVSLSPTQKEFILTELMTKEFARFGVNDIAKLLGVKKEQLSGWRLDKKGKPEIHTLKGYRNWRKIFAESGIDLATLPTETIDCLAKVLTLNTEREGVENTLAFELPELAEPVKLLVLDRYKELSQSVSTQAWHRFSLKTLHLLIPELIKSTSEQNTLLEQFQLKADVRKRYSDYKKLPTKEVLTEIYNPTVNKTVSQAFKVMDALLEKYGKDQIHYITVEMPRDDNEEEERKRIKELQTKNSQRKNDSQQYFLQKSGWSQEKFQATIHKNRRFLAKLLYYFEQDGVCAYTGNPISPELLVSDSTEIDAIIPISISLDDSINNKVLVLSHANQVKGQQTPYDARMAGAFNKINGKFSNWDEYQKWVESCPFSRKKVNNLLETRNIFDSEQVQKFLSRNLNDTRYASRLVLNTLQSFFENQDTIVRVVNGSFTHTLRKKWGADLDKTRETHHHHAVDATLCAVTPFVKVSRYHYAVNEETGEKFMREIDVETGEILDEIPYREYKKAKHYERKTYQVKWSNFREQLKPITIHPKIKFSHQVDRKANRKLSDATIYSVREKTEVKTLKSGKEKITTDEYTIGKIKDIYTVDGWEAFKKKQDKLLMKEFDEKTYELLVTIAATTPDFQEVEEKNGKVKRVKRSPFAVYCEENGIPAIRKYAKKNNGPVIRSLKYYDGKLNKHINITKDEKGRPVEQTKNGRKVTLQSLKPYRYDIYQDLETKAYYTVQLYYSDLRFVEGEYGITEKEYMKKVAEQTKGQVVRFCFSLQKNDGLEIEWKDSQRYDVRFYNFQSANSINFKGLEQEMIPAENQFKQKPYNNGAINLNIAKYGKEGNKLRKFNTDILGKKHHLSYEKEPKNIIK

SEQ ID NO: 84 - protein, 1197 aa, Artificial Sequence
  source: /note="Description of Artificial Sequence: Synthetic polypeptide"
MAPKKKRKVDYKDHDGDYKDHDIDYKDDDDKMYSIGLALGISSVGWSVIDEETGKIVDLGIRLFSAKNSEKNLERRTSRGARRLIRRKTNRLKDAKKLLEAIGFYEDKALKNVCPYQLRVKGLTEGLTKGELYKVVLHIVKKRGISYLDEDDAEAAKESQDYKEQVRKNAQLLTKYTPGQIQLQRLKENNRVKTGINGQGHYQLNVFKVSAYADELATILKTQQALYPNELTDDWIALFVQPGIAENAGLIYRKRPYYHGPGNEANNSPYGRWSDFQKTGQPAANIFDKLIGKDFQGELRASGLSLSAQQYNLLNDLTNLKIDGEVSLSPTQKEFILTELMTKEFARFGVNDIAKLLGVKKEQLSGWRLDKKGKPEIHTLKGYRNWRKIFAESGIDLATLPTETIDCLAKVLTLNTEREGVENTLAFELPELAEPVKLLVLDRYKELSQSVSTQAWHRFSLKTLHLLIPELIKSTSEQNTLLEQFQLKADVRKRYSDYKKLPTKEVLTEIYNPTVNKTVSQAFKVMDALLEKYGKDQIHYITVEMPRDDNEEEERKRIKELQTKNSQRKNDSQQYFLQKSGWSQEKFQATIHKNRRFLAKLLYYFEQDGVCAYTGNPISPELLVSDSTEIDAIIPISISLDDSINNKVLVLSHANQVKGQQTPYDARMAGAFNKINGKFSNWDEYQKWVESCPFSRKKVNNLLETRNIFDSEQVQKFLSRNLNDTRYASRLVLNTLQSFFENQDTIVRVVNGSFTHTLRKKWGADLDKTRETHHHHAVDATLCAVTPFVKVSRYHYAVNEETGEKFMREIDVETGEILDEIPYREYKKAKHYERKTYQVKWSNFREQLKPITIHPKIKFSHQVDRKANRKLSDATIYSVREKTEVKTLKSGKEKITTDEYTIGKIKDIYTVDGWEAFKKKQDKLLMKEFDEKTYELLVTIAATTPDFQEVEEKNGKVKRVKRSPFAVYCEENGIPAIRKYAKKNNGPVIRSLKYYDGKLNKHINITKDEKGRPVEQTKNGRKVTLQSLKPYRYDIYQDLETKAYYTVQLYYSDLRFVEGEYGITEKEYMKKVAEQTKGQVVRFCFSLQKNDGLEIEWKDSQRYDVRFYNFQSANSINFKGLEQEMIPAENQFKQKPYNNGAINLNIAKYGKEGNKLRKFNTDILGKKHHLSYEKEPKNIIKKRPAATKKAGQAKKKK

SEQ ID NO: 85 - protein, 9 aa, Artificial Sequence
  source: /note="Description of Artificial Sequence: Synthetic peptide"
LAGLIDADG

SEQ ID NO: 86 - protein, 82 aa, Artificial Sequence
  source: /note="Description of Artificial Sequence: Synthetic polypeptide"
TNLSDHEKETGKQLVIQESILMLPEEVEEVIGNKPESDILVHTAYDESTDENVMLLTSDAPEYKPWALVIQDSNGENKIKML

SEQ ID NO: 87 - protein, 1072 aa, Bacillus sp.
MSELDYRIGLDIGTNSIGWGVIELFWNKDRERYEKVRIVDKGVRMFDKAEIPNKGASLAEPRRIARSSRRRLNRKSQRKKEIRNLLVQHGMITQEELDLLYPLSKKSIDIWDIRLDGLDRLLNHLEWARLLIHLAQRRGFKSNRKSELKDAETGKVLSSIQVNEKRLFLYRTVGEMWIKDAEFSKYDRRRNSPNEYVFSVSRADLEKEIVTLFEAQRKFQSSYASKNLQETYLQIWAHQLPFASGNAILNKVGYCSLLKGKERRIPKATYTFQYFSALDQVNRTRLGPDFQPFTQEQKEIILDKMFQRTDYYKKKTIPEVSYYDIRKWLELDETIQFKGLNYDPNEELKKIEKKPFINLKAFYEIKKVVANYAERTNEAFSTLDYDAIAYALTVYKTDKDIRSYLKKSNNLSKRCYDDQLIEELFTLSYTKFGHLSFKAINHVLPIMQEGRTYQEAIHQLGYDTTNLKKENRSMFLPLIPDEITNPIVKRAITQARKVVNAIIRRYGSPNSVHIELARELSKSHDERKKIMTAHDENYKKNKGAISILIENGILNPTGYDIVRYKLWKEQGERCAYSLKEIPPDTFFNELKKERNGSPILEVDHILPYSQSFIDSYHNKVLVYSDENRNKGNRIPYTYFLETNKDWEAFERYVRSNKLFSKKKREYLLKKTYLPRESELIKERHLNDTRYASTFLKNFIEQNLQFKEVEVNLRKKRVQTVNGVITAHLRKRWGLEKNRQETYLHHAMDAIIVACTDHHMVTRITEYYQIKESNKSVKKPYFPMPWEGFRDELLSHLASQPIAKKISEELKAGYQSSDYIFVSRMPKRSVTGAAHDQTIRRKGGIDKKGKTIIIKRVRLKDIKFDENGDFKMVGKEQDLATYEAIKQRYLEHRKNSKKAFETPLYKPSKKGTGNLIKRVKIEGQTKAFVREVNGGVAQNSDLVRVDLFEKDDKYYMVPIYVPDTVCSELPKKVVKSGKGYEQWLTLDNSFTFKSSLYPYDLVRLVKGNEDRFLYFGTLDIDSDRLNFKDVNKPSKQNEYRYSLKTIENLEKYEVGVLGDLRLVKQETRRIFNR

SEQ ID NO: 88 - protein, 1072 aa, Artificial Sequence
  source: /note="Description of Artificial Sequence: Synthetic polypeptide"
MSELDYRIGLAIGTNSIGWGVIELFWNKDRERYEKVRIVDKGVRMFDKAEIPNKGASLAEPRRIARSSRRRLNRKSQRKKEIRNLLVQHGMITQEELDLLYPLSKKSIDIWDIRLDGLDRLLNHLEWARLLIHLAQRRGFKSNRKSELKDAETGKVLSSIQVNEKRLFLYRTVGEMWIKDAEFSKYDRRRNSPNEYVFSVSRADLEKEIVTLFEAQRKFQSSYASKNLQETYLQIWAHQLPFASGNAILNKVGYCSLLKGKERRIPKATYTFQYFSALDQVNRTRLGPDFQPFTQEQKEIILDKMFQRTDYYKKKTIPEVSYYDIRKWLELDETIQFKGLNYDPNEELKKIEKKPFINLKAFYEIKKVVANYAERTNEAFSTLDYDAIAYALTVYKTDKDIRSYLKKSNNLSKRCYDDQLIEELFTLSYTKFGHLSFKAINHVLPIMQEGRTYQEAIHQLGYDTTNLKKENRSMFLPLIPDEITNPIVKRAITQARKVVNAIIRRYGSPNSVHIELARELSKSHDERKKIMTAHDENYKKNKGAISILIENGILNPTGYDIVRYKLWKEQGERCAYSLKEIPPDTFFNELKKERNGSPILEVDHILPYSQSFIDSYHNKVLVYSDENRNKGNRIPYTYFLETNKDWEAFERYVRSNKLFSKKKREYLLKKTYLPRESELIKERHLNDTRYASTFLKNFIEQNLQFKEVEVNLRKKRVQTVNGVITAHLRKRWGLEKNRQETYLHHAMDAIIVACTDHHMVTRITEYYQIKESNKSVKKPYFPMPWEGFRDELLSHLASQPIAKKISEELKAGYQSSDYIFVSRMPKRSVTGAAHDQTIRRKGGIDKKGKTIIIKRVRLKDIKFDENGDFKMVGKEQDLATYEAIKQRYLEHRKNSKKAFETPLYKPSKKGTGNLIKRVKIEGQTKAFVREVNGGVAQNSDLVRVDLFEKDDKYYMVPIYVPDTVCSELPKKVVKSGKGYEQWLTLDNSFTFKSSLYPYDLVRLVKGNEDRFLYFGTLDIDSDRLNFKDVNKPSKQNEYRYSLKTIENLEKYEVGVLGDLRLVKQETRRIFNR

SEQ ID NO: 89 - protein, 1060 aa, Artificial Sequence
  source: /note="Description of Artificial Sequence: Synthetic polypeptide"
MKQTSYSLGLAIGIASVGYGLIDNDENIVDAGVRLFPEANSKNNDGRRKSRGSKRLIRRKRHRIARVKHLLKESGIDVSYENTVLTNPYEIRCKGLTLPLTNHELSIALLHLAKRRGVHNVKSMDQEKVKGNELSTKEQLTINDNLLEEKFICELQLERLNKEGIVRSHSNRFKTADYIKEIKNLLETQAKQNTLVTEEFIEKYIEIFSGRRKYYEGPGGESKYGWKGDIEKWYEGLMGKCTYFPKELRCVKHAYSAALFNLLNDLNNLSINREEDTKLSQYEKEQIIEKIFKVRKTPTLTQIAKLLKVDPTNIKGFRTKANGTPDFLSIKIYHDLKGIIDDKQLLDDIAFLDNVAQILTVWQDSQSIQEKLKTLNKNLDDKTIKEISELKKYTQTHSLSLKLINVLLPELWETTKNQMTILSELKLKPRKIDLHNCNEIPVNMINDLIVSPVVRRSLTQSIEMINQIIKDYGHPREIVIELAREKNSEEKKNFIKSLNEKNKQINDEVIEKLNASNHRDNKGMFNKVKLWILQDGHCLYSLKPIRLEDLLNNPNHYEIDHIIPKSVSFDDSMSNKVLVYQIENSKKGNRTPYQYLTSADKTITYEKFKANITQLAKSNHKISKKKLDYLLEERDINRFHIKKEFINRNLVDTRYATRSLINLLKYYFSEKDINVKVKSINGSFTDYLRKLWNFPKDREFYHKHHAEDALIIAMANKIFTTRKIFKEQNSVFSDEQILDGEVTNILSDDQFQAEFTEKFYKVQAIKKYDKYKYSHRVDKKPNRQLFDDTLYSTREFEGEEYYIGKIKDIYNLKDKRLKKIFTKSPEKILMYQHDSQTFKKLKQIMRSYEDEVNPLAKYHKETGEYLRKECKKGNGPIVKSLKYRVTKLGVHKDITHKYENSKNKVVILSLKPFRMDVFKENGVYKFITIRYCDLKETVNSYTISEHLYKAKLKAKDIKSMDSFKWSFYKNDLLEYNGELCTFKGVNDDKKNKIEVNWVEKNFAIYAEKKNLKSKQLVKSITKSTVKSLLKYTTDILGNRYPVRNEKLKLMIRKQTFRGDL

SEQ ID NO: 90 - protein, 1108 aa, Artificial Sequence
  source: /note="Description of Artificial Sequence: Synthetic polypeptide"
MAIRSIKLKLKTRTGPEAQNLRKGIWRTHRLLNEGVAYYMKMLLLFRQESTGGQTKKELQEELVRHIREQQQKNRADKNTQALPLDKAFAALRQLYELLVPSSIGQSGDAQIISRKFLSPLVDPNSEGGKGTSKAGAKPTWQKKKEANDPTWEQDYEKWKKRREEDPTASVITTLEEYGIRPIFPLYTNTVADIAWLPLQSNQFVRTWDRDMLQQAIERLLSWESWNKRVQEEYSKLQEKMTQLNEQLEGGQEWISLLEQYEEQREQELIENMTAANDKYRITKRQMKGWNELYEQWSTVLPNASHEQYREALKRVQQRLRGRFGDAHFFQYLMKEEHHLIWKGNPQRIHYFVARNELKKRLEEAKQNATMTLPDARKHPLWVRFDARGGNLQDYYLTAEADNPRSRRFVTFSQLIWPNESGWMEKQDVEVELALSKQFYQQVTLQKNDKGKQEIEFKDKGSGSTFSGHLGGAKLQLERGDLEKEEKDFEGGEIGSVYLNIVIDFEPLQEVKNGRLQSPYGQVLQLVRRPNEFPKVTTYKSEELVEWIKSSTKDSAGVESLESGFRVMSIALGLRTAAATSIFSVEESNDANAAGFSYWIEGTPLVAVHKRSYMLKLPGEQVEKQVREKRDERQDQQRRVRFQIRILSQVIRMAKKQNRERADELDHLSQALEKQKSLLDQTDRTFWNGIVCDLTDALREKEGGWEQAVVQIHRKAEEHVGKVVQAWRKRFDADERKGIAGLSMWSIEELDSLRKLLISWSRRTRNPREINCFEQGHTSHQRLLTHIQNVKEDRLKQLSHAIVMTALGYVYDEKKLEWFAKYPACQVILFENLSQYRSNMDRSTKENSTLMKWAHRSIPKYVHMQAEPYGIQIGDVRAEYSSRFHAKTGTPGIRCKMVSGHDLQGRRFENLQKRLISEQFLTEEQVKQLRPGDIVPDDSGEWFMTLSDGSEGKEVVFLQADINAAQNLQKRFWQRYNELFKVSCRVLIRGEEEYLIPKTKSVQAKLGKGLFVKKTDTVMKDVYVWDSQAKLKGKTTFTEESESPEQLEDFQEIIEEAEEAKGTYRTLFRDPSGVFFPEFVWSTQKDFWSEVKRRLYGKLRERFLMKTR

SEQ ID NO: 91 - protein, 1092 aa, Artificial Sequence
  source: /note="Description of Artificial Sequence: Synthetic polypeptide"
MRYSIGLAIGTTSIGNAVINKDLQRFEHLGVRIFDAAENPKDGSSLSAPRRLARSSRRRLRRRKHRVERTKQLLINKGLLTKTQVKNLYNSKNINLDIWDIRVSGIDRKLFNNEFARVLIHFSKNRGFKSNRKSELKEDDNGAILSAVKENRELMDEKGYRTIAEMLVSDEKYEGTKRNKGGDYSHVVARSDIENEICLLFQKQREYGHPFATEENEEAFLSIWSSQRPFSTKDDIVKKIGNCTLEPKEKRAPKSTYTFERFRALDKLNRLRILSTTAPSRPLTNEERKSILSSLFSKKEVKYKELRKLLKLTDDQRFNEIYYSPDETIEKTENRTFLSLESQYKIKKIIEKTESKNMQSSYHPIDYDTIGYALTVFKDDKDIQHYLQNSYIDSKGKAIPNMANREYNLELIEELLGLSFAKFGHLSLKALNNILPYMEEGEPYHIACEMASYQFSQRLSKEKHRLLPPIPVDEIPNPVVVRALTQVRKVLNSIIKKYGPPSDIYIELAREMSKPFKERKSLEREFNENRQINEKAKAHISELYRIPNDPRPHDILKFKLWNEQNGICPYSLKPISIEYLFNIGYAEVDHIIPYSRSFDDSNGNKVLVLTRENQNKLNRTPYEWFGHEENRWEDFVSFIRTMKVGKKKKNMLLKKNFDEEQEEQILSRNLNDTRYITRYIKSFIEDNLEFRTEENKEQYVHTVNGAYTSLMRKRWGLNKDRRGNDLHHAVDAAIIAVSLPFKNKVNAYFKRQETGLSKLLNNKKDIFPEPWRNFIKELEARMIQDPEKMKRALESLELETYGEIFLNKLKPIFVSRMPKHSIKGQIHEETIRRVRGFTEEGFLVTVKKTRLDQIPFDKNGDFPMYGKETDIKTYMAIKQRYLEYGQDKQKAFAVPLRKPSKNPKNAPIVRSVKIEGKANRVVMLDDKAAADNASIVRTEVFRHKKTGEYYLTPVYVADILSNKIPDRLITIKKSYSDWDRITDEHEYLFSLYNNDLVKIILPKEKETKKYTGGNHLWQEGFFYFKGVDSSNAGIKIINHLNSFEARIGTKRLIAFEKYQVNPLGEINKVHGEKRPGELLNKEEIKENRKNIS

SEQ ID NO: 92 - protein, 1150 aa, Artificial Sequence
  source: /note="Description of Artificial Sequence: Synthetic polypeptide"
MYSIGLALGISSVGWSVIDERTGNVIDLGIRLFSAKNSEKNLERRTNRGGRRLIRRKTNRLKDAKKILAAVGFYEDKSLKNSCPYQLRVKGLTEPLSKGEIYKVTLHILKKRGISYLDEDDTEAAKESQDYKEQVRENAQLLTKYTPGQIQLQRLKENNRVKTGINAQGNYQLNVFKVSAYANELATILKTQQAFYPNELTDDWIALFVQPGIAEEAGLIYRKRPYYHGPGNEANNSPYGRWSDFKKTGQPATNIFDKLIGKDFQGELRASGLSLSAQQYNLLNDLTNLKIDGEIPLSPEQKEYILAELMTKEFTRFGVNDVVKLLGVKKERLSGWRLDKKGKPEIHTLKGYRNWRKIFAESGIDLATLPTETIDCLAKVLTLNTEREGIENTLAFELSELAESVKLLVLDRYKELSQSVSTQAWHRFSLKTLHLLIPELMNATSEQNTLLEQFQLKSDVRKRYSEYKKLPTKDVLTEIYNPTVNKTVSQAFKVIDALLVKYGKEQIRYITIEMPRDDNEEDEKKRIKELHAKNSQRKNDSQSYFMQKSGWSQEKFQTTIQKNRRFLAKLLYYYEQDGICAYTGLSISPELLVSDSTEIDHIIPISISLDDSINNKVLVLSKANQVKGQQTPYDAWMDGSFKKINGKFSNWDDYQKWVESCHFSHKKENNLLETRNIFDSEQVEKFLARNLNDTRYASRLVLNTLQSFFANQETKVRVVNGSFTHTLRKKWGADLDKTRETHHHHAVDATLCAVTPFVKVSRYHYAVKEETGEKVMREIDFETGEIVDEMSYREFKKSKKYERKTYQVKWPNFREQLKPVNLHPRIKFSHQVDRKANRKLSDATIYSVREKTEVKTLKSGKQKITTDEYTIGKIKDIYTVDGWEAFKKKQDKLLMKDLDEKTYERLLSIAETTPDFQEVEEKNGKVKRVKRSPFAVYCEENDIPAIRKYAKKNNGPLIRSLKYYDGKLNKHINITKDSQGRPVEKTKNGRKVTLQSLKPYRYDIYQDLETKAYYTVQLYYSDLRFVEGKYGITEKEYMKKVAEQTKGQVVRFCFSLQKNDGLEIEWKDSQCYDVRFYNFQSANSINFKGLEQEMMPAENQFKQKPYNNGAINLNIAKYGKEGKKLRKFNTDILGKKHYLYYEKEPKNIIK

SEQ ID NO: 93 - protein, 1068 aa, Artificial Sequence
  source: /note="Description of Artificial Sequence: Synthetic polypeptide"
MKYVLGLAIGIASCGWAVINQEKHRIEDLGVRIFDKAENPKDGKSLATPRRDARSTRRTLRRKKHRMQRIKILLVKHGLLSKTEIDHLYESATEIDVWYLRLNALERRLNPKEFARVLIHLAKRRGFKSNRKETTLSENGQILENISENLQIMEQQNYRTVGEMILKDKKFENHKRNKDGTYIGTVTRQQLKEEIQMIFNAQRLYKNDYATEEFESSYLEIWASQRPYASKDQIEKMIGYCTLEPKEKRVPKASWSFQYFVALQTINNLRLINKDRIEELSFEEKNQIMNLALEKSIVKYIDIRKLLSIPNEFHFNNLLYSADTVDTAVENKKCIEFKEYHSINKLYKQIYGKSVPNLLPIDYDTIACGLTIFKDDKDILAYLQNKYVNAKGKPISNLAKKTYDDTFIQALLTLNFSKMGHLSFKALKNIIPFLEEGLSYDKACEKAGYNFKGTSHAEKTKYLPVIPQNTNPVVHRALSQTRKVINAIIKKYGSPSAIHIETARELSKTFQERKEIDSMYQDNSKKNEHAIHKLKELGLINPSGINIVKFKLWNEQDGRCMYSGKYIEPHRLFEEGYTEVDHILPYSRSLDDSYNNKALTLGIENQRKGNKTPYEYIGKTSIWHEFETRVQSNKRINKKKQQKLLLQYFSYTREQEFIKRNLNDTRYATIYLSTLIQQHLIFSESSRKKKVHTVSGIITSHLRSRWGFNKDRKEGHIHHALDAVIVAVTSDHMIQRVTKYYKLKELNRNLQAKRMQFPEPWEGFRLELEARISPNTQQYLKRILFKNYADVNLSEIKPIFVSRMPKRSITGELHQETIRKLIGYNEKGKVLTAIKTKLEDIPFDANGDFPMYGKETDLYTYNAIKERYLSHKKDKRKSFQDPLYKPTKSGEIGPLIKSIKIMDTRTIVNPVNQGKGVVYNSKIARTDVFKKDEKYYLIPIYTIDLLKNILPQKAITAGKGYEDWTTIDPSFTFLFSLFPNDLIQIVPSKNKTIKARTTVSKKEVLLPSLTGYFKGVHSGTAGITVETHDGSVIANVGSKQLLLFEKYQVDVLGHYTKIKEEKRIGMVI

SEQ ID NO: 94 - protein, 1081 aa, Artificial Sequence
  source: /note="Description of Artificial Sequence: Synthetic polypeptide"
MQYVLGLAIGIASCGWAVINQEKERIEDLGVRIFDKAENPKDGKSLAAPRRDARSTRRTLRRKKHRMQRIKILLVKHGLLSQTELDHLYESATEVDVWNLRLDAIERKLNPKEFTRVLIHLAKRRGFKSNSKETTLSENGQILESISENQQIMEQKNYKTIGEMILKDKKFENHKRNKDGTYIGTVTRQQLQDEIQIIFNAQRLYKNNYATKEFESSYLEIWASQRPYASKDQIEKMIGYCTLEQKEKRVPRASWSFQYFVALHTINNLRLISKDRIEELSFKEKKQIMNLALEKPIVKYIDIRKLLSIPNELHFNSLLYSADTVDTTVENRKCIELKEYHSINKVYKQIYGKNALNLLPIDYDTIAYGLTIFKDDKDILEHLKNKYVNAKGKPINNLAKKTYDDTFIQALLTLNFSKMGHLSFKALKNIIPFLEEGLSYDKACEKAGYNFKGTSYTEQTKYLPVIPQNTNPVVHRALSQTKKVINAIIKKYGSPNAIHIETARELSKTFQERKEIDSMYQDNSKKNEHAIHKLKELGNINPSGINIVKFKLWNEQDGKCMYSGKYIEPHRLFEEGYTEVDHILPYSRSLDDSYNNKTLTLGIENQRKGNKTPYEYMGNTSIWDEYEIRVQSNKKINKKKQQKLLLQHFSYAREQEFIERNLNDTRYATIYLSSLIQQHLIFSESSRKKKVHTVSGIITSHLRSRWGFNKDRKEGHIHHALDAVIVAVTSDHMIQRVTKYYKLKELNRNLQAKRMPFPEPWEGFRLELEARISPNTQQYLKGLRFKNYADVNLCEIKPIFVSKMPKRSITGELHQETIRKFIGYNEKGKVLTAIKTKLEDIPFDANGDFPMYGKETDLYTYNSIKERYLSHKKDKRKSFQEPLYKPTKSGGIGPLIKSIKIMDTRTIVNPVNQGKGVVYNSKIARTDVFKKDDKYYLIPIYTIDLMKNILPQKAITAGKGYEDWITIDHSFTFLFSLFPNDLIKIVPSKNKEIKARSTSSKKEILLPSLIGYFKSVHSGTAGITVESHDGRFIANVGSKQLLLFEKYQVDVLGHYTKIKEEKRIGMATCNDNKKSTAFGSL

SEQ ID NO: 95 - protein, 1150 aa, Artificial Sequence
  source: /note="Description of Artificial Sequence: Synthetic polypeptide"
MYSIGLALGISSVGWSVIDEETGKIVDLGVRLFSAKNSEKNLERRTSRGARRLIRRKTNRLKDAKKLLEAIGFYEDKALKNVCPYQLRVKGLTEGLTKGELYKVVLHIVKKRGISYLDEDDAEAAKESQDYKEQVRKNAQLLTKYTPGQIQLQRLKENNRVKTGINGQGHYQLNVFKVSAYADELATILKTQQALYPNELTDDWIALFVQPGIAENAGLIYRKRPYYHGPGNEANNSPYGRWSDFQKTGQPAANIFDKLIGKDFQGELRASGLSLSAQQYNLLNDLTNLKIDGEVSLSPEQKEFILTELMTKEFARFGVNDIAKLLGVKKEQLSGWRLDKKGKPEIHTLKGYRNWRKIFAEAGIDLATLPTETIDCLAKVLTLNTEREGVENTLAFELPELAEPVKSLVLDHYKELSQSISTQAWHRFSLKTLHLLIPELIKSTSEQNTLLEQFQLKAGVRKRYSDYKKLPTKEVLAEIYNPTVNKTVSQAFKVMDALLEKYGKDQIHYITVEMPRDDNEEEERKRIKELQTKNSQRKNDSQQYFLQKSGWSQEKFQATIHKNRRFLAKLLYYFEQDGVCAYTGNPISPELLVSDSTEIDHIIPISISLDDSINNKVLVLSHANQVKGQQTPYDARMAGAFNKINGKFSNWDEYQKWVESRPFSRKKVNNLLETRNIFDSEQVQKFLSRNLNDTRYASRLVLNTLQSFFENQDTIVRVVNGSFTHTLRKKWGADLDKTRETHHHHAVDATLCAVTPFVKVSRYHYAVNEETGEKFMREIDVETGEILDEIPYREYKKAKHYERKTYQVKWSNFREQLKPITIHPKIKFSHQVDRKANRKLSDATIYSVREKTEVKTLKSGKEKITTDEYTIGKIKDIYTVDGWEAFKKKQDKLLMKEFDEKTYELLVTIAATTPDFQEVEEKNGKVKRVKRSPFAVYCEENGIPAIRKYAKKNNGPVIRSLKYYDGKLNKHINITKDEKGRPVEQTKNGRKVTLQSLKPYRYDIYQDLETKAYYTVQLYYSDLRFVEGEYGITEKEYMKKVAEQTKGQVVRFCFSLQKNDGLEIEWKDSQRYDVRFYNFQSANSINFKGLEQEMIPAENQFKQKPYNNGAINLNIAKYGKEGKKLRKFNTDILGKKHHLSYEKEPKNIIK

SEQ ID NO: 96 - protein, 1052 aa, Artificial Sequence
  source: /note="Description of Artificial Sequence: Synthetic polypeptide"
MVTKYILGLAIGITSVGYGIINYEDKTIIDAGVRLFPEANVENNEGRRSKRGARRLKRRRIHRLDRIKQLLSEYNLVDLDNIPQSPSPYEIRVKGLREELSKDELVIALLHIAKRRGIHNVEAVDETQDEGNELSTKEQLAKNNNLLKDKYVCELLLERLKDGKVRGEKNRFKTTDIIKEVKQLLETQKEAHQLDDDFINRYIDLIETRREYFEGPGKGSPFGWGGDLKKWYETLMGHCTYFPNELRSVKYSYSADLFNALNDLNNLVIQREGNSKLEYHEKYHIIENVFKQKKKPTLKQIANEIGVSPDDIKGFRINKSGKETFTEFKLYHDLKKVLIDQSILENVQLLDQIAEILTIYQDKESIINELNQLSEIINEQDKESISNLSGYNGTHRLSLKCINLVIEELWHTSRNQMEIFTYLNIKPKKIDLAKTNKIPKNMIDEFILSPVVKRTFGQAINVINKVIEKYGVPEDIIIELARESNSKDKQKFINSLQKKNETTRKRINEIIGQYGNQNAKRLVEKIRLHDEQEGKCLYSLESIPLEDLINNPQYYEVDHIIPRSVSFDNSYQNKVLVKQTENSKKSNRTPYQYFNSGETKLSYNQFKQHVLNLSKSKDRISKKKKEYLLEERDINKYEVQKEFINRNLVDTRYATRELTNYLKAYFSANDMDVKVKTINGSFTDYLRKVWKFKKERNHGYKHHAEDALIIANADFLFKENKKLKKANAILEQPSLDNGKSDATVENDNEYVETFSIPKQVNDIKEFRDFKFSHRVDKKPNRQLINDTLYSTRKIENHTFIVSPITNIYSKDNDELKKKFNKNPEKFLMYQHDPKTFEKLEVIMKQYANEKNPLAKYHEETGEYLTKYSKKNNGPIVKTIKVLGDKVGKHLDVTHKYKYSNSKIVKKTINPYRFDVYLTDKGYKFITISYLDVLKKDNYYYILKEKYEELKIKKSISDTDQFIGSFYYNDLIKINDQIFKVVGVNNDLLNRIELDLLDISYKEYCKINNIKTNRIIKGITKKITNIEKFSTDVLGNLYKAHSNHPQLIFKQRD

SEQ ID NO: 97 - protein, 1063 aa, Artificial Sequence
  source: /note="Description of Artificial Sequence: Synthetic polypeptide"
MRELDYRIGLAIGTNSIGWGVIELSWNKDRERYEKVRIVDQGVRMFDRAEMPKTGASLAEPRRIARSSRRRLNRKSQRKKNIRNLLVQHGVITQEELDSLYPLSKKSMDIWGIRLDGLDRLLNHFEWARLLIHLAQRRGFKSNRKSELKDTETGKVLSSIQLNEKRLSLYRTVGEMWMKDPDFSKYDRKRNSPNEYVFSVSRAELEKEIVTLFAAQRRFQSPYASKDLQETYLQIWTHQLPFASGNAILNKVGYCSLLKGKERRIPKATYTFQYFSALDQVNRTRLGPDFQPFTKEQREIILNNMFQRTDYYKKKTIPEVTYYDIRKWLELDETIQFKGLNYDPNEELKKIEKKPFINLKAFYEINKVVANYSERTNETFSTLDYDGIGYALTVYKTDKDIRSYLKSSHNLPKRCYDDQLIEELLSLSYTKFGHLSLKAINHVLSIMQKGNTYKEAVDQLGYDTSGLKKEKRSKFLPPISDEITNPIVKRALTQARKVVNAIIRRHGSPHSVHIELARELSKNHDERTKIVSAQDENYKKNKGAISILSEHGILNPTGYDIVRYKLWKEQGERCAYSLKEIPADTFFNEPILEVDHILPYSQSFIDSYHNKVLVYSDENRKKGNRIPYTYFLETNKDWEAFERYVRSNKFFSKKKREYLLKRAYLPRESELIKERHLNDTRYASTFLKNFIEQNLQFKEAEDNPRKRRVQTVNGVITAHFRKRWGLEKDRQETYLHHAMDAIIVACTDHHMVTRVTEYYQIKESNKSVKKPYFPMPWEGFRDELLSHLASQPIAKKISEELKAGYQSLDYIFVSRMPKRSITGAAHKQTIMRKGGIDKKGKTIIIERLHLKDIKFDENGDFKMVGKEQDMATYEAIKQRYLEHGKNSKKAFETPLYKPSKKGTGNLIKRVKVEGQAKSFVREVNGGVAQNGDLVRVDLFEKDDKYYMVPIYVPDTVCSELPKKVVASSKGYEQWLTLDNSFTFKFSLYPYDLVRLVKGDEDRFLYFGTLDIDSDRLNFKDVNKPSKKNEYRYSLKTIEDLEKYEVGVLGDLRLVRKETRRNFH

SEQ ID NO: 98 - protein, 1064 aa, Artificial Sequence
  source: /note="Description of Artificial Sequence: Synthetic polypeptide"
MSELDYRIGLAIGTNSIGWGVIELFWNKDRERYEKVRIVDKGVRMFDKAEIPNKGASLAEPRRIARSSRRRLNRKSQRKKEIRNLLVQHGMITQEELDLLYPLSKKSIDIWDIRLDGLDRLLNHLEWARLLIHLAQRRGFKSNRKSELKDAETGKVLSSIQVNEKRLFLYRTVGEMWIKDAEFSKYDRRRNSPNEYVFSVSRADLEKEIVTLFEAQRKFQSSYASKNLQETYLQIWAHQLPFASGNAILNKVGYCSLLKGKERRIPKATYTFQYFSALDQVNRTRLGPDFQPFTQEQKEIILDKMFQRTDYYKKKTIPEVSYYDIRKWLELDETIQFKGLNYDPNEELKKIEKKPFINLKAFYEIKKVVANYAERTNEAFSTLDYDAIAYALTVYKTDKDIRSYLKKSNNLSKRCYDDQLIEELFTLSYTKFGHLSFKAINHVLPIMQEGRTYQEAIHQLGYDTTNLKKENRSMFLPLIPDEITNPIVKRAITQARKVVNAIIRRYGSPNSVHIELARELSKSHDERKKIMTAHDENYKKNKGAISILIENGILNPTGYDIVRYKLWKEQGERCAYSLKEIPPDTFFNEPILEVDHILPYSQSFIDSYHNKVLVYSDENRNKGNRIPYTYFLETNKDWEAFERYVRSNKLFSKKKREYLLKKTYLPRESELIKERHLNDTRYASTFLKNFIEQNLQFKEVEVNLRKKRVQTVNGVITAHLRKRWGLEKNRQETYLHHAMDAIIVACTDHHMVTRITEYYQIKESNKSVKKPYFPMPWEGFRDELLSHLASQPIAKKISEELKAGYQSSDYIFVSRMPKRSVTGAAHDQTIRRKGGIDKKGKTIIIKRVRLKDIKFDENGDFKMVGKEQDLATYEAIKQRYLEHRKNSKKAFETPLYKPSKKGTGNLIKRVKIEGQTKAFVREVNGGVAQNSDLVRVDLFEKDDKYYMVPIYVPDTVCSELPKKVVKSGKGYEQWLTLDNSFTFKSSLYPYDLVRLVKGNEDRFLYFGTLDIDSDRLNFKDVNKPSKQNEYRYSLKTIENLEKYEVGVLGDLRLVKQETRRIFNR

SEQ ID NO: 99 - protein, 1368 aa, Streptococcus pyogenes
MDKKYSIGLDIGTNSVGWAVITDDYKVPSKKLKGLGNTDRHGIKKNLIGALLFDSGETAEATRLKRTARRRYTRRKNRICYLQEIFSNEMAKVDDSFFHRLEESFLVEEDKKHERHPIFGNIVDEVAYHEKYPTIYHLRKKLADSTDKVDLRLIYLALAHMIKFRGHFLIEGDLNPDNSDVDKLFIQLVQTYNQLFEENPINASRVDAKAILSARLSKSRRLENLIAQLPGEKKNGLFGNLIALSLGLTPNFKSNFDLAEDAKLQLSKDTYDDDLDNLLAQIGDQYADLFLAAKNLSDATLLSDILRVNSEITKAPLSASMIKRYDEHHQDLTLLKALVRQQLPEKYKEIFFDQSKNGYAGYIDGGASQEEFYKFIKPILEKMDGTEELLAKLNREDLLRKQRTFDNGSIPYQIHLGELHAILRRQEDFYPFLKDNREKIEKILTFRIPYYVGPLARGNSRFAWMTRKSEETITPWNFEEVVDKGASAQSFIERMTNFDKNLPNEKVLPKHSLLYEYFTVYNELTKVKYVTEGMRKPAFLSGEQKKAIVDLLFKTNRKVTVKQLKEDYFKKIECFDSVEISGVEDRFNASLGTYHDLLKIIKDKDFLDNEENEDILEDIVLTLTLFEDREMIEERLKTYAHLFDDKVMKQLKRRRYTGWGRLSRKLINGIRDKQSGKTILDFLKSDGFANRNFMQLIHDDSLTFKEDIQKAQVSGQGDSLHEHIANLAGSPAIKKGILQTVKVVDELVKVMGRHKPENIVIEMARENQTTQKGQKNSRERMKRIEEGIKELGSDILKEYPVENTQLQNEKLYLYYLQNGRDMYVDQELDINRLSDYDVDHIVPQSFLKDDSIDNKVLTRSDKNRGKSDNVPSEEVVKKMKNYWRQLLNAKLITQRKFDNLTKAERGGLSELDKVGFIKRQLVETRQITKHVAQILDSRMNTKYDENDKLIREVRVITLKSKLVSDFRKDFQFYKVREINNYHHAHDAYLNAVVGTALIKKYPKLESEFVYGDYKVYDVRKMIAKSEQEIGKATAKYFFYSNIMNFFKTEITLANGEIRKRPLIETNGETGEIVWDKGRDFATVRKVLSMPQVNIVKKTEVQTGGFSKESILPKRNSDKLIARKKDWDPKKYGGFDSPTVAYSVLVVAKVEKGKSKKLKSVKELLGITIMERSSFEKDPIDFLEAKGYKEVRKDLIIKLPKYSLFELENGRKRMLASAGELQKGNELALPSKYVNFLYLASHYEKLKGSPEDNEQKQLFVEQHKHYLDEIIEQISEFSKRVILADANLDKVLSAYNKHRDKPIREQAENIIHLFTLTNLGAPAAFKYFDTTIDRKRYTSTKEVLDATLIHQSITGLYETRIDLSQLGGD

SEQ ID NO: 100 - protein, 1368 aa, Artificial Sequence
  source: /note="Description of Artificial Sequence: Synthetic polypeptide"
MDKKYSIGLAIGTNSVGWAVITDDYKVPSKKLKGLGNTDRHGIKKNLIGALLFDSGETAEATRLKRTARRRYTRRKNRICYLQEIFSNEMAKVDDSFFHRLEESFLVEEDKKHERHPIFGNIVDEVAYHEKYPTIYHLRKKLADSTDKVDLRLIYLALAHMIKFRGHFLIEGDLNPDNSDVDKLFIQLVQTYNQLFEENPINASRVDAKAILSARLSKSRRLENLIAQLPGEKKNGLFGNLIALSLGLTPNFKSNFDLAEDAKLQLSKDTYDDDLDNLLAQIGDQYADLFLAAKNLSDATLLSDILRVNSEITKAPLSASMIKRYDEHHQDLTLLKALVRQQLPEKYKEIFFDQSKNGYAGYIDGGASQEEFYKFIKPILEKMDGTEELLAKLNREDLLRKQRTFDNGSIPYQIHLGELHAILRRQEDFYPFLKDNREKIEKILTFRIPYYVGPLARGNSRFAWMTRKSEETITPWNFEEVVDKGASAQSFIERMTNFDKNLPNEKVLPKHSLLYEYFTVYNELTKVKYVTEGMRKPAFLSGEQKKAIVDLLFKTNRKVTVKQLKEDYFKKIECFDSVEISGVEDRFNASLGTYHDLLKIIKDKDFLDNEENEDILEDIVLTLTLFEDREMIEERLKTYAHLFDDKVMKQLKRRRYTGWGRLSRKLINGIRDKQSGKTILDFLKSDGFANRNFMQLIHDDSLTFKEDIQKAQVSGQGDSLHEHIANLAGSPAIKKGILQTVKVVDELVKVMGRHKPENIVIEMARENQTTQKGQKNSRERMKRIEEGIKELGSDILKEYPVENTQLQNEKLYLYYLQNGRDMYVDQELDINRLSDYDVDHIVPQSFLKDDSIDNKVLTRSDKNRGKSDNVPSEEVVKKMKNYWRQLLNAKLITQRKFDNLTKAERGGLSELDKVGFIKRQLVETRQITKHVAQILDSRMNTKYDENDKLIREVRVITLKSKLVSDFRKDFQFYKVREINNYHHAHDAYLNAVVGTALIKKYPKLESEFVYGDYKVYDVRKMIAKSEQEIGKATAKYFFYSNIMNFFKTEITLANGEIRKRPLIETNGETGEIVWDKGRDFATVRKVLSMPQVNIVKKTEVQTGGFSKESILPKRNSDKLIARKKDWDPKKYGGFDSPTVAYSVLVVAKVEKGKSKKLKSVKELLGITIMERSSFEKDPIDFLEAKGYKEVRKDLIIKLPKYSLFELENGRKRMLASAGELQKGNELALPSKYVNFLYLASHYEKLKGSPEDNEQKQLFVEQHKHYLDEIIEQISEFSKRVILADANLDKVLSAYNKHRDKPIREQAENIIHLFTLTNLGAPAAFKYFDTTIDRKRYTSTKEVLDATLIHQSITGLYETRIDLSQLGGD

SEQ ID NO: 101 - protein, 1388 aa, Streptococcus thermophilus
MTKPYSIGLDIGTNSVGWAVTTDNYKVPSKKMKVLGNTSKKYIKKNLLGVLLFDSGITAEGRRLKRTARRRYTRRRNRILYLQEIFSTEMATLDDAFFQRLDDSFLVPDDKRDSKYPIFGNLVEEKAYHDEFPTIYHLRKYLADSTKKADLRLVYLALAHMIKYRGHFLIEGEFNSKNNDIQKNFQDFLDTYNAIFESDLSLENSKQLEEIVKDKISKLEKKDRILKLFPGEKNSGIFSEFLKLIVGNQADFRKCFNLDEKASLHFSKESYDEDLETLLGYIGDDYSDVFLKAKKLYDAILLSGFLTVTDNETEAPLSSAMIKRYNEHKEDLALLKEYIRNISLKTYNEVFKDDTKNGYAGYIDGKTNQEDFYVYLKKLLAEFEGADYFLEKIDREDFLRKQRTFDNGSIPYQIHLQEMRAILDKQAKFYPFLAKNKERIEKILTFRIPYYVGPLARGNSDFAWSIRKRNEKITPWNFEDVIDKESSAEAFINRMTSFDLYLPEEKVLPKHSLLYETFNVYNELTKVRFIAESMRDYQFLDSKQKKDIVRLYFKDKRKVTDKDIIEYLHAIYGYDGIELKGIEKQFNSSLSTYHDLLNIINDKEFLDDSSNEAIIEEIIHTLTIFEDREMIKQRLSKFENIFDKSVLKKLSRRHYTGWGKLSAKLINGIRDEKSGNTILDYLIDDGISNRNFMQLIHDDALSFKKKIQKAQIIGDEDKGNIKEVVKSLPGSPAIKKGILQSIKIVDELVKVMGGRKPESIVVEMARENQYTNQGKSNSQQRLKRLEKSLKELGSKILKENIPAKLSKIDNNALQNDRLYLYYLQNGKDMYTGDDLDIDRLSNYDIDHIIPQAFLKDNSIDNKVLVSSASNRGKSDDVPSLEVVKKRKTFWYQLLKSKLISQRKFDNLTKAERGGLSPEDKAGFIQRQLVETRQITKHVARLLDEKFNNKKDENNRAVRTVKIITLKSTLVSQFRKDFELYKVREINDFHHAHDAYLNAVVASALLKKYPKLEPEFVYGDYPKYNSFRERKSATEKVYFYSNIMNIFKKSISLADGRVIERPLIEVNEETGESVWNKESDLATVRRVLSYPQVNVVKKVEEQNHGLDRGKPKGLFNANLSSKPKPNSNENLVGAKEYLDPKKYGGYAGISNSFTVLVKGTIEKGAKKKITNVLEFQGISILDRINYRKDKLNFLLEKGYKDIELIIELPKYSLFELSDGSRRMLASILSTNNKRGEIHKGNQIFLSQKFVKLLYHAKRISNTINENHRKYVENHKKEFEELFYYILEFNENYVGAKKNGKLLNSAFQSWQNHSIDELCSSFIGPTGSERKGLFELTSRGSAADFEFLGVKIPRYRDYTPSSLLKDATLIHQSVTGLYETRIDLAKLGEG

SEQ ID NO: 102 - protein, 1388 aa, Artificial Sequence
  source: /note="Description of Artificial Sequence: Synthetic polypeptide"
MTKPYSIGLAIGTNSVGWAVTTDNYKVPSKKMKVLGNTSKKYIKKNLLGVLLFDSGITAEGRRLKRTARRRYTRRRNRILYLQEIFSTEMATLDDAFFQRLDDSFLVPDDKRDSKYPIFGNLVEEKAYHDEFPTIYHLRKYLADSTKKADLRLVYLALAHMIKYRGHFLIEGEFNSKNNDIQKNFQDFLDTYNAIFESDLSLENSKQLEEIVKDKISKLEKKDRILKLFPGEKNSGIFSEFLKLIVGNQADFRKCFNLDEKASLHFSKESYDEDLETLLGYIGDDYSDVFLKAKKLYDAILLSGFLTVTDNETEAPLSSAMIKRYNEHKEDLALLKEYIRNISLKTYNEVFKDDTKNGYAGYIDGKTNQEDFYVYLKKLLAEFEGADYFLEKIDREDFLRKQRTFDNGSIPYQIHLQEMRAILDKQAKFYPFLAKNKERIEKILTFRIPYYVGPLARGNSDFAWSIRKRNEKITPWNFEDVIDKESSAEAFINRMTSFDLYLPEEKVLPKHSLLYETFNVYNELTKVRFIAESMRDYQFLDSKQKKDIVRLYFKDKRKVTDKDIIEYLHAIYGYDGIELKGIEKQFNSSLSTYHDLLNIINDKEFLDDSSNEAIIEEIIHTLTIFEDREMIKQRLSKFENIFDKSVLKKLSRRHYTGWGKLSAKLINGIRDEKSGNTILDYLIDDGISNRNFMQLIHDDALSFKKKIQKAQIIGDEDKGNIKEVVKSLPGSPAIKKGILQSIKIVDELVKVMGGRKPESIVVEMARENQYTNQGKSNSQQRLKRLEKSLKELGSKILKENIPAKLSKIDNNALQNDRLYLYYLQNGKDMYTGDDLDIDRLSNYDIDHIIPQAFLKDNSIDNKVLVSSASNRGKSDDVPSLEVVKKRKTFWYQLLKSKLISQRKFDNLTKAERGGLSPEDKAGFIQRQLVETRQITKHVARLLDEKFNNKKDENNRAVRTVKIITLKSTLVSQFRKDFELYKVREINDFHHAHDAYLNAVVASALLKKYPKLEPEFVYGDYPKYNSFRERKSATEKVYFYSNIMNIFKKSISLADGRVIERPLIEVNEETGESVWNKESDLATVRRVLSYPQVNVVKKVEEQNHGLDRGKPKGLFNANLSSKPKPNSNENLVGAKEYLDPKKYGGYAGISNSFTVLVKGTIEKGAKKKITNVLEFQGISILDRINYRKDKLNFLLEKGYKDIELIIELPKYSLFELSDGSRRMLASILSTNNKRGEIHKGNQIFLSQKFVKLLYHAKRISNTINENHRKYVENHKKEFEELFYYILEFNENYVGAKKNGKLLNSAFQSWQNHSIDELCSSFIGPTGSERKGLFELTSRGSAADFEFLGVKIPRYRDYTPSSLLKDATLIHQSVTGLYETRIDLAKLGEG

SEQ ID NO: 103 - protein, 1368 aa, Staphylococcus aureus [sequence omitted]

SEQ ID NO: 104 - protein, 1368 aa, Artificial Sequence
  source: /note="Description of Artificial Sequence: Synthetic polypeptide"
MDKKYSIGLAIGTNSVGWAVITDEYKVPSKKFKVLGNTDRHSIKKNLIGALLFDSGETAEATRLKRTARRRYTRRKNRICYLQEIFSNEMAKVDDSFFHRLEESFLVEEDKKHERHPIFGNIVDEVAYHEKYPTIYHLRKKLVDSTDKADLRLIYLALAHMIKFRGHFLIEGDLNPDNSDVDKLFIQLVQTYNQLFEENPINASGVDAKAILSARLSKSRRLENLIAQLPGEKKNGLFGNLIALSLGLTPNFKSNFDLAEDAKLQLSKDTYDDDLDNLLAQIGDQYADLFLAAKNLSDAILLSDILRVNTEITKAPLSASMIKRYDEHHQDLTLLKALVRQQLPEKYKEIFFDQSKNGYAGYIDGGASQEEFYKFIKPILEKMDGTEELLVKLNREDLLRKQRTFDNGSIPHQIHLGELHAILRRQEDFYPFLKDNREKIEKILTFRIPYYVGPLARGNSRFAWMTRKSEETITPWNFEEVVDKGASAQSFIERMTNFDKNLPNEKVLPKHSLLYEYFTVYNELTKVKYVTEGMRKPAFLSGEQKKAIVDLLFKTNRKVTVKQLKEDYFKKIECFDSVEISGVEDRFNASLGTYHDLLKIIKDKDFLDNEENEDILEDIVLTLTLFEDREMIEERLKTYAHLFDDKVMKQLKRRRYTGWGRLSRKLINGIRDKQSGKTILDFLKSDGFANRNFMQLIHDDSLTFKEDIQKAQVSGQGDSLHEHIANLAGSPAIKKGILQTVKVVDELVKVMGRHKPENIVIEMARENQTTQKGQKNSRERMKRIEEGIKELGSQILKEHPVENTQLQNEKLYLYYLQNGRDMYVDQELDINRLSDYDVDHIVPQSFLKDDSIDNKVLTRSDKNRGKSDNVPSEEVVKKMKNYWRQLLNAKLITQRKFDNLTKAERGGLSELDKAGFIKRQLVETRQITKHVAQILDSRMNTKYDENDKLIREVKVITLKSKLVSDFRKDFQFYKVREINNYHHAHDAYLNAVVGTALIKKYPKLESEFVYGDYKVYDVRKMIAKSEQEIGKATAKYFFYSNIMNFFKTEITLANGEIRKRPLIETNGETGEIVWDKGRDFATVRKVLSMPQVNIVKKTEVQTGGFSKESILPKRNSDKLIARKKDWDPKKYGGFDSPTVAYSVLVVAKVEKGKSKKLKSVKELLGITIMERSSFEKNPIDFLEAKGYKEVKKDLIIKLPKYSLFELENGRKRMLASAGELQKGNELALPSKYVNFLYLASHYEKLKGSPEDNEQKQLFVEQHKHYLDEIIEQISEFSKRVILADANLDKVLSAYNKHRDKPIREQAENIIHLFTLTNLGAPAAFKYFDTTIDRKRYTSTKEVLDATLIHQSITGLYETRIDLSQLGGD

SEQ ID NO: 105 - protein, 1300 aa, Francisella tularensis novicida
MSIYQEFVNKYSLSKTLRFELIPQGKTLENIKARGLILDDEKRAKDYKKAKQIIDKYHQFFIEEILSSVCISEDLLQNYSDVYFKLKKSDDDNLQKDFKSAKDTIKKQISEYIKDSEKFKNLFNQNLIDAKKGQESDLILWLKQSKDNGIELFKANSDITDIDEALEIIKSFKGWTTYFKGFHENRKNVYSSNDIPTSIIYRIVDDNLPKFLENKAKYESLKDKAPEAINYEQIKKDLAEELTFDIDYKTSEVNQRVFSLDEVFEIANFNNYLNQSGITKFNTIIGGKFVNGENTKRKGINEYINLYSQQINDKTLKKYKMSVLFKQILSDTESKSFVIDKLEDDSDVVTTMQSFYEQIAAFKTVEEKSIKETLSLLFDDLKAQKLDLSKIYFKNDKSLTDLSQQVFDDYSVIGTAVLEYITQQIAPKNLDNPSKKEQELIAKKTEKAKYLSLETIKLALEEFNKHRDIDKQCRFEEILANFAAIPMIFDEIAQNKDNLAQISIKYQNQGKKDLLQASAEDDVKAIKDLLDQTNNLLHKLKIFHISQSEDKANILDKDEHFYLVFEECYFELANIVPLYNKIRNYITQKPYSDEKFKLNFENSTLANGWDKNKEPDNTAILFIKDDKYYLGVMNKKNNKIFDDKAIKENKGEGYKKIVYKLLPGANKMLPKVFFSAKSIKFYNPSEDILRIRNHSTHTKNGSPQKGYEKFEFNIEDCRKFIDFYKQSISKHPEWKDFGFRFSDTQRYNSIDEFYREVENQGYKLTFENISESYIDSVVNQGKLYLFQIYNKDFSAYSKGRPNLHTLYWKALFDERNLQDVVYKLNGEAELFYRKQSIPKKITHPAKEAIANKNKDNPKKESVFEYDLIKDKRFTEDKFFFHCPITINFKSSGANKFNDEINLLLKEKANDVHILSIDRGERHLAYYTLVDGKGNIIKQDTFNIIGNDRMKTNYHDKLAAIEKDRDSARKDWKKINNIKEMKEGYLSQVVHEIAKLVIEYNAIVVFEDLNFGFKRGRFKVEKQVYQKLEKMLIEKLNYLVFKDNEFDKTGGVLRAYQLTAPFETFKKMGKQTGIIYYVPAGFTSKICPVTGFVNQLYPKYESVSKSQEFFSKFDKICYNLDKGYFEFSFDYKNFGDKAAKGKWTIASFGSRLINFRNSDKNHNWDTREVYPTKELEKLLKDYSIEYGHGECIKAAICGESDKKFFAKLTSVLNTILQMRNSKTGTELDYLISPVADVNGNFFDSRQAPKNMPQDADANGAYHIGLKGLMLLGRIKNNQEGKKLNLVIKNEEYFEFVQNRNN

SEQ ID NO: 106 - protein, 1063 aa, Artificial Sequence
  source: /note="Description of Artificial Sequence: Synthetic polypeptide"
MRELDYRIGLDIGTNSIGWGVIELSWNKDRERYEKVRIVDQGVRMFDRAEMPKTGASLAEPRRIARSSRRRLNRKSQRKKNIRNLLVQHGVITQEELDSLYPLSKKSMDIWGIRLDGLDRLLNHFEWARLLIHLAQRRGFKSNRKSELKDTETGKVLSSIQLNEKRLSLYRTVGEMWMKDPDFSKYDRKRNSPNEYVFSVSRAELEKEIVTLFAAQRRFQSPYASKDLQETYLQIWTHQLPFASGNAILNKVGYCSLLKGKERRIPKATYTFQYFSALDQVNRTRLGPDFQPFTKEQREIILNNMFQRTDYYKKKTIPEVTYYDIRKWLELDETIQFKGLNYDPNEELKKIEKKPFINLKAFYEINKVVANYSERTNETFSTLDYDGIGYALTVYKTDKDIRSYLKSSHNLPKRCYDDQLIEELLSLSYTKFGHLSLKAINHVLSIMQKGNTYKEAVDQLGYDTSGLKKEKRSKFLPPISDEITNPIVKRALTQARKVVNAIIRRHGSPHSVHIELARELSKNHDERTKIVSAQDENYKKNKGAISILSEHGILNPTGYDIVRYKLWKEQGERCAYSLKEIPADTFFNEPILEVDHILPYSQSFIDSYHNKVLVYSDENRKKGNRIPYTYFLETNKDWEAFERYVRSNKFFSKKKREYLLKRAYLPRESELIKERHLNDTRYASTFLKNFIEQNLQFKEAEDNPRKRRVQTVNGVITAHFRKRWGLEKDRQETYLHHAMDAIIVACTDHHMVTRVTEYYQIKESNKSVKKPYFPMPWEGFRDELLSHLASQPIAKKISEELKAGYQSLDYIFVSRMPKRSITGAAHKQTIMRKGGIDKKGKTIIIERLHLKDIKFDENGDFKMVGKEQDMATYEAIKQRYLEHGKNSKKAFETPLYKPSKKGTGNLIKRVKVEGQAKSFVREVNGGVAQNGDLVRVDLFEKDDKYYMVPIYVPDTVCSELPKKVVASSKGYEQWLTLDNSFTFKFSLYPYDLVRLVKGDEDRFLYFGTLDIDSDRLNFKDVNKPSKKNEYRYSLKTIEDLEKYEVGVLGDLRLVRKETRRNFH

SEQ ID NO: 107 - protein, 1064 aa, Artificial Sequence
  source: /note="Description of Artificial Sequence: Synthetic polypeptide"
MSELDYRIGLDIGTNSIGWGVIELFWNKDRERYEKVRIVDKGVRMFDKAEIPNKGASLAEPRRIARSSRRRLNRKSQRKKEIRNLLVQHGMITQEELDLLYPLSKKSIDIWDIRLDGLDRLLNHLEWARLLIHLAQRRGFKSNRKSELKDAETGKVLSSIQVNEKRLFLYRTVGEMWIKDAEFSKYDRRRNSPNEYVFSVSRADLEKEIVTLFEAQRKFQSSYASKNLQETYLQIWAHQLPFASGNAILNKVGYCSLLKGKERRIPKATYTFQYFSALDQVNRTRLGPDFQPFTQEQKEIILDKMFQRTDYYKKKTIPEVSYYDIRKWLELDETIQFKGLNYDPNEELKKIEKKPFINLKAFYEIKKVVANYAERTNEAFSTLDYDAIAYALTVYKTDKDIRSYLKKSNNLSKRCYDDQLIEELFTLSYTKFGHLSFKAINHVLPIMQEGRTYQEAIHQLGYDTTNLKKENRSMFLPLIPDEITNPIVKRAITQARKVVNAIIRRYGSPNSVHIELARELSKSHDERKKIMTAHDENYKKNKGAISILIENGILNPTGYDIVRYKLWKEQGERCAYSLKEIPPDTFFNEPILEVDHILPYSQSFIDSYHNKVLVYSDENRNKGNRIPYTYFLETNKDWEAFERYVRSNKLFSKKKREYLLKKTYLPRESELIKERHLNDTRYASTFLKNFIEQNLQFKEVEVNLRKKRVQTVNGVITAHLRKRWGLEKNRQETYLHHAMDAIIVACTDHHMVTRITEYYQIKESNKSVKKPYFPMPWEGFRDELLSHLASQPIAKKISEELKAGYQSSDYIFVSRMPKRSVTGAAHDQTIRRKGGIDKKGKTIIIKRVRLKDIKFDENGDFKMVGKEQDLATYEAIKQRYLEHRKNSKKAFETPLYKPSKKGTGNLIKRVKIEGQTKAFVREVNGGVAQNSDLVRVDLFEKDDKYYMVPIYVPDTVCSELPKKVVKSGKGYEQWLTLDNSFTFKSSLYPYDLVRLVKGNEDRFLYFGTLDIDSDRLNFKDVNKPSKQNEYRYSLKTIENLEKYEVGVLGDLRLVKQETRRIFNR

SEQ ID NO: 108 - DNA, 690 bp, Artificial Sequence
  source: /note="Description of Artificial Sequence: Synthetic polynucleotide"
atggccgctggacctgcccctgaagccagaagcctgatggacgagcagaccttcctggataacttcaacaacctgaagtaccccagaaagacctacctgtgctacgaggtggaactgctggtgggcgagaaccacatccctctggacgactacaagggcttcgtgcacaacgagggctttgatatgggcctggaacggtgccacgccgagctgatcttcctggaaagaatggcctcttggaatctggacaccgagctgagataccggatcaccgtgttcatctcttggtccccatgtcctgagtgcgccgacgagctggttaagttcctgcgggaaaatagacacgtgaacctgagaatctttgccgctagaatctacgactggtatcagggctacgaggccggcctgcgggccctgaaagccgccggagccgaagtggccatgatgaccctgcacgagttcgagtactgctggaacaacttcgtggaccaccagcaggacgaagatacacctttccccccctgggacaacctggtcgccagatccgaggaactgagccagagactggaaggcatcctgcagcctagcgtgctggtgttctgctggcctagccaagtgtccgtgaccgccgcccacagcgacatcatgagccaggcctctagagcctgggagaagcggcgggaccccccc

SEQ ID NO: 109 - DNA, 546 bp, Artificial Sequence
  source: /note="Description of Artificial Sequence: Synthetic polynucleotide"
atggacgagcagaccttcctggataacttcaacaacctgaagtaccccagaaagacctacctgtgctacgaggtggaactgctggtgggcgagaaccacatccctctggacgactacaagggcttcgtgcacaacgagggctttgatatgggcctggaacggtgccacgccgagctgatcttcctggaaagaatggcctcttggaatctggacaccgagctgagataccggatcaccgtgttcatctcttggtccccatgtcctgagtgcgccgacgagctggttaagttcctgcgggaaaatagacacgtgaacctgagaatctttgccgctagaatctacgactggtatcagggctacgaggccggcctgcgggccctgaaagccgccggagccgaagtggccatgatgaccctgcacgagttcgagtactgctggaacaacttcgtggaccaccagcaggacgaagatacacctttccccccctgggacaacctggtcgccagatccgaggaactgagccagagactggaaggcatcctgcag

SEQ ID NO: 110 - DNA, 603 bp, Artificial Sequence
  source: /note="Description of Artificial Sequence: Synthetic polynucleotide"
atggaagccagccctgcctctagacccagacctctgatggacccccacatgttcaccggcaacttcaccaacaaccctagagtgttcggcctgcaccagacatacctgtgttacgaggtgaagcggcagggtcctgacggcacaagagacctgatgaacgagcagagagatttcctgtgcaaccaggccaagaaccacttcagcggcagcgaagatcaccacgccgagcggtgcttcctggaccggatacctagctggcaactggaccctgctcaaacatacagagtgacctgttttatctcttggtccccgtgctttagctgcgcccaggaggtggccgagttcctgcacgagaacccccacgtgaacctgagaatcttcgccgctagaatctacgactacctgcctagatacgaggaaggactgcagatgctgcagaacgccggcgcccaggtgtccatcatgaccagcgaggaattcggccactgctgggacaccttcgtggacagacagggacaccccttccagccttgggagggcctggacgagcacagccaggccctgagcggcagactgcaggctatcctgcaaaaccagggcaat

SEQ ID NO: 111 - DNA, 555 bp, Artificial Sequence
  source: /note="Description of Artificial Sequence: Synthetic polynucleotide"
atggacccccacatgttcaccggcaacttcaccaacaaccctagagtgttcggcctgcaccagacatacctgtgttacgaggtgaagcggcagggtcctgacggcacaagagacctgatgaacgagcagagagatttcctgtgcaaccaggccaagaaccacttcagcggcagcgaagatcaccacgccgagcggtgcttcctggaccggatacctagctggcaactggaccctgctcaaacatacagagtgacctgttttatctcttggtccccgtgctttagctgcgcccaggaggtggccgagttcctgcacgagaacccccacgtgaacctgagaatcttcgccgctagaatctacgactacctgcctagatacgaggaaggactgcagatgctgcagaacgccggcgcccaggtgtccatcatgaccagcgaggaattcggccactgctgggacaccttcgtggacagacagggacaccccttccagccttgggagggcctggacgagcacagccaggccctgagcggcagactgcaggctatcctgcaa

SEQ ID NO: 112 - DNA, 576 bp, Artificial Sequence
  source: /note="Description of Artificial Sequence: Synthetic polynucleotide"
atggaaccttggcggcctagccctagaaaccctatggacagaatcgaccccaacaccttccgatttcacttccccaacctgctgtacgccagcggaagaaagctgtgctacctgtgttttcaggtggagacaggcgactacttctcttgcgacgacagcgaccggggcgtgttcagaaacaaggtgcacccctgggccagatgccacgccgagcagtgcttcctgagctggttccgggaccagtacccctgcagagatgagtactacaacgtgacctggtttctgagctggtccccttgtcctacatgcgccgaggaagtggtggaattcctggaagagtatagaaatctgaccctgtctatcttcaccagcagactgtactacttctaccaccctaactaccagcagggcctgcggaagctgtgggatgccggcgtgcaactggacatcatgagctgtgatgatttcgagcactgctgggacaacttcgtggaccacaagggcatgagattccaaagaagaaacctgctgaaggactacgacttcctggccgctgagctgcaggagatcctgaga

SEQ ID NO: 113 - DNA, 534 bp, Artificial Sequence
  source: /note="Description of Artificial Sequence: Synthetic polynucleotide"
atggaccccaacaccttccgatttcacttccccaacctgctgtacgccagcggaagaaagctgtgctacctgtgttttcaggtggagacaggcgactacttctcttgcgacgacagcgaccggggcgtgttcagaaacaaggtgcacccctgggccagatgccacgccgagcagtgcttcctgagctggttccgggaccagtacccctgcagagatgagtactacaacgtgacctggtttctgagctggtccccttgtcctacatgcgccgaggaagtggtggaattcctggaagagtatagaaatctgaccctgtctatcttcaccagcagactgtactacttctaccaccctaactaccagcagggcctgcggaagctgtgggatgccggcgtgcaactggacatcatgagctgtgatgatttcgagcactgctgggacaacttcgtggaccacaagggcatgagattccaaagaagaaacctgctgaaggactacgacttcctggccgctgagctgcaggagatcctgaga

SEQ ID NO: 114 - DNA, 456 bp, Artificial Sequence
  source: /note="Description of Artificial Sequence: Synthetic polynucleotide"
atgatcaacctggtccagaccccttacgacctgaactccggctaccccatcgtgcggagaacactggaagataagaagaaactggtgaagcacgagggcttcggccccgagagctgctgcgccaccatcgagtacaccctgcggggcaacagcagatacgcctttggaaattctcagatgcaggtggaaatgcctccaaacatctacgcccacaattgggttaagctgcatggcgagatgaccgccctggtggccgctatcaggcggatcgagagagtggacagcacatccgccgtgctgcctatcaccagcgcttatatcgagctgagaccttgtgaagcctcttgcctgcctgctctccacaacatgctgcccgacaacattacagtgtacttcagcttcctgcatcctacccaagtggatcagtggaagcagagcgccagagccctgtgcgcc

SEQ ID NO: 115 - DNA, 456 bp, Artificial Sequence
  source: /note="Description of Artificial Sequence: Synthetic polynucleotide"
atgatcaacctggtgcaaaccccttacaacctgcggagcggctaccccatcgtgcggagaacactggaagataagaaaaaactggtcaagcaggacggctttggacctgagagctgctgcgccaccgtggaatacaccctgagaggcaattctagatacgccttcggcaacagccagatgcggattgaaatgcctcctgacatctacacaaacaactgggtgaagctgcatggcgagatggccgccctgatcgccgctatcagaagaatcgagaagtccggaaatggcgacgagcagctgcctatcaccagcgtgtatatcgagctgcgcccatgtgaagccaactgcatgcaggccctgcagaacatcctgcccgacaacaccacagtgtacttcagcttcctgcatcctgatcaggtggacgagtggaagcaatctgccagagccctctgtgct

SEQ ID NO: 116 - DNA, 444 bp, Artificial Sequence
  source: /note="Description of Artificial Sequence: Synthetic polynucleotide"
atgatcaagaccgagtactctctgagcagcggctaccccatcgtgcggagaaccctggaagataagaaaaacctggtcaagcagcctggatttggccctgagagctgctgcgccgtggtgcaatacagactgagaggcaatatcagatacgccttcggcaacagcagaatgcaaatcagcatgcctccaggcatctacacccacaactgggtgcggctgcatggcgagatggccgctctggtggccgccatcaacagaatcgagcggtactctacagacgacgtgatccctattacagccgcttatatcgaactccgcccctgtgaagccaattgcatgcaggccctgcggaacatcctgcctgaagatgcttgtgtgtactactccttcgaccaccccacccaggtggacgagtggaagctgagagccaacgagctgtgtagc

SEQ ID NO: 117 - DNA, 453 bp, Artificial Sequence
  source: /note="Description of Artificial Sequence: Synthetic polynucleotide"
atgatccagctcgtgcaagctgaatacagcatcaagtccggctaccccatcgtgcggagaacactggaagataagaaaaagctgattgagaagcccggcttcggccctgagagctgctgcgctaccatcgaatatcagctgcggggatctacaagatacgcctttggcaacagccagatgaaaatggaaatgcctccagacatctacacccacaactgggtcaagctgcatgccgagatggccgctctggtggccgccatcagaagaatcgagagattcgacgccgacaaggaacaggtgcctatcacaaacgtgtacatcgagctgagaccttgcgaggccaattgcatgcaggccctgcagaacatcctgcctgatggcaccaccgtgtactacagcttcctgcatcctaccgaggtggaagagtggaagcggagcgcccacgagctgtgt

SEQ ID NO: 118 - DNA, 441 bp, Artificial Sequence
  source: /note="Description of Artificial Sequence: Synthetic polynucleotide"
atgatcaagaccgagtacgccctgaactctggctaccccattgtgcggagaaccctggaagataagaagaaactggtgaaacaacctggcttcggacctgagagctgctgcgccgtggtggaatatagactgagaggcaacatccggtacgcttttggaaacagccagatgcacgtgtccatgcctccaggcatctacacacacaactgggtgaagctgcatggcgagatggccgctctggtcgccgctatcaacagaatcgagagattcagcaccgacgacgtgatccccatcaccggcgcctacatcgagctgcgcccctgtgaagccaattgtctgcaggccctccataatatcctgcctgaagatgccaacgtgtactacagcttcgaccaccctacacagctggacgagtggaagctgcgggcccacgagctgtgc

SEQ ID NO: 119 - DNA, 441 bp, Artificial Sequence
  source: /note="Description of Artificial Sequence: Synthetic polynucleotide"
atgatcaagaccgagtacaccctcagatctggctaccctatcgtgcggagaaccctggaaaacaagaaaaacctggtgaagcagcctggattcggccctgagagctgctgcgccgtggtggaatatagactgcgcggaaatatccggtacgcctttggcaacagcagaatgcaggtgtccgtgccccccggcatctacaccaacaactgggtgcggctgcatggcgagatggccgctctggtcgccgctatcgaaagaatcgagagattcagcagcgacgatgtgatccccattacagccgcctacatcgagctgagaccatgtgaagctaattgcatgcaagccctgcataacatcctgcctgagaacgccaacgtgtactacagcttcgaccatcctacacaggttgaggaatggaagctgcgggcccacgagctgtgc

SEQ ID NO: 120 - protein, 10 aa, Artificial Sequence
  source: /note="Description of Artificial Sequence: Synthetic peptide"
SGGSGGSGGS

SEQ ID NO: 121 - DNA, 80323 bp, Homo sapiens
cttcctgaccggcgcgcgcagcctgctgccgcggtcagcgcctgctcctgctcctccgctcctcctgcgcggggtgctgaaacagcccggggaagtagagccgcctccggggagcccaaccagccgaacgccgccggcgtcagcagccttgcgcggccacagcatgaccgctcgcggcctggcccttggcctcctcctgctgctactgtgtccagcgcaggtgagcggtcgccggccaccgggacgccctgtggggacgtggcggggccgagagccggggaaggcgacgggcccagcgacggctcaggcccgggtcctggggaagttggtctggcgatggagagctcggaggttcctcacttgtcctgtttctgtctccggccacgctctctttcctgtggtctggaagagggtggcagtgggggcttgggtgacctgttctgagcttgttccatctgtggtcacctaatttctctgtgtaggatgtggcaccagaagaagggaggaaagtgggtagagtgggatagggacactacttgctttttaaaaaattctgctacatgcgcacgaactccaaaatttaggagctctaaccactttatttcctcttctcatcacctgaggatggaggtggaagcagaggtaaagagacacaaacttcctcaagcacccggtgaaactgccttgagtacttgacataagtcagcttggtcttctaaagagggcaggttacttttcatcaactcctttttacacctcaggacactgagactcacagggcggtattgaatttccccttgtcactattagccagcgacaggatggggcctggaactcggtgtcctgctgactccttctgggggcttttgcttggtttaatagctttgggaaagagcacctcagtatttgtgtgtctgtagtttcctcttttaaaactggagtggggcagtgtcacgctgtgactcgttaaaccaaatcaggatgagagtgcctccggggaattgtgtccttgtgcacattaacgcccctcacataggtgtggcgtcaataggaagtggtgaatcaggggagagggggttccgtggactagaaaaaactctccttcgacttctatttagttctcagaaggggataggtgatgttgatccaataatggactaagagccaggagaagggctccgcgggaggatctcttgagctcagcagttcaagaccagccggggcaacatggtgaaacaccgtcttaaaaacattttgtttttcttttcattgttgaggttgaggctgctgtgagctgtgatcacgccggtgtactccagcctgggcaacagagcaagaccctgtgtcaaaacaaaaaagagagagaaataaataatagcaattatgtgccgtagagaaaatgtggctattctgtttccctagagttttttaaaatttatttttaaaatttatttattttagagacaggttcttgctctgttgcccaggcgtgggggcagtgtcgccatcatagctcactgcagcctggaactcctggcctcaagcagtccttccaccttggcctcccaaagcactgggattattgtgagcaccactcctggcccctcctagagttttagatcaggaccttaaataggcttcccttttttttggagacagagtctctgttgcccagtctggagtgtagtggcgcaatctcggctcactgcaacctctgcctcctggattcaagcaattctggtgcctcagcctcccaggtagctaggattacaggtgcccaccaccacgcccagctaatttttgtattttccgtggagatggggtttcaccgtgttggtcaggctggtctcgaaatcctgacctctagcgatccgccctcctcttttggggattacaggtgtgagccacctcgcccagccaggcttcacattattaagtagccatctcttaagtattttttaaatctcaagtacccaaggctgatggccaatgagtgcttcttttatgacatttgggataggtcagaggtttgttgtaagtctcttgcaaaaatgcctggaggccttttcaaggtctgtaaaccttaactggaaataatcctattattattttaaaaattcctcatgtctgaaagctttcagtgcacctgaacagattggggtggagccatgaagccaaacagattgggagagagagtgtgtctgcttttagaattcgtaccgatgatagcagctcattagcttcagtctgagcgctagtagagttctatcatggaattatggactagttgtcctgtgtaagatctgaaatacatgttggggggatttttgctttttcttaatgttcaatatgtacagatgatgtaataacattactagactgccttgtttttaaaaccctgtagtcatctaaaaactatatgcagttttgagacatagcctttatttttcccggctgtaattttggtaagctttatcttgagggacttggaacatagagaagcctgggtagaaattaagcattaaaatggcttttcctcagaagactgggaatggttaatcttttgacctgtgagtgattaagaacaaccatctgaaattggaatgactgtgggaaatctttccccatctttcccactccttgactgatgctgtgatcagaaattttactaacataagtaatcaaggggaaaatgagatttttttaaatttgagccagtgggcagagggaaaaggactcgctgaataggcctttgtattcctccagtgtttgttatattacccagaacaaagaatcactctggtcatgaagacagtgtgctctctctttcctgggtaaccctccactcctaaaagggatgcagtattctaagcatggcagattacctacagcggaagcctggatcagtcatctctgatctcgggtgcccctttctgccctttgacctccagctctgtgaagggcatcagctctccagtcaaattgaactgcttgctagcaaaatcctgcccatcttccagggccccatttcacatgctacattatctacgacattcttgtcctgttcccctaactagaatgccttccctctgaagttctgaatctttatttaaactgctgcaacagcatttgctgcctcattaaaagaccttggtgtgggtcttgactcttctctgttcccaagagtgatcttgggtaagccagttatcctctggagcctcagtttcctcctctgtaaaattggattaactgtgccaactatgcttgtgaaagacaaatatttcctaattgaactaccgaattgcaggctccttaagagcaataactgttgctctccaatatcatctacaaatgtggccaggacacttgacttgggactcttttttttttttttttttttgaaacagggtcttgcactgtcccccaggctgaagtgtagtggtttgattgtggctcactgaagtgttgaccctgggctcaagctatccttccacctcagcctcccacgtagctgggactgcaggtgcatgccaccatgcccaactaatttttaaattttttgtagacacaaggtcttgctgtgttgcccaaggtggtcttgaattcctgggctggagatcctcccaccttggcctcccaaagtgctgggattacaagcatgagccaccgtgctggccctggaatctttttttttttttttcaagaccaggtcttactttggttgcccaggctggagcgcagtggcacgatcttggctcactacagcctcgacctcccgggctcaggtgattctcccacatcaagcctcccgagtagctgggactataggtgtgcaccatcatgccctgctaattttttgtatttttagtagagaaggggttttgccagcttgcccaggctggtctcgaactcctgagctcaagtgataccatccacctccgcctcccaaagtgctgggattacaggtgtgagccaccatgcctggcccactgggattctttgatcataagatatttgggccttgaaatggattttggggagagacttagaaactagtggcaatcaaaattggatttgcagttggtttctaggtgatggcagtgatcagctgcggccagccaggtttttcttcatctggactgtgcctctcactttcaaatttttggaacatttgctttggcagcaaaacttttaaaaaaccaactctctctggtgcaggtgttctgttggaggatttgagagaagctttaaaattttatcttattactgtcccttgcttaggtcacaagaggagctcaaaataatttcataaacatgaattggcttccctagacacaacaaaggataagatcaaaagaattaacccatttaaaaaaatcagtctaggctggtcctaaggtagtgtgttatcaattgatcaaagtcagttacagatcgaactccttgatctactctttcctcctgctcactactgcacttgactagtccaaaacaataagtaagtagtaaaaaaaagaaaaaaagtccgtctatacactgtaaagtgctgtgtaaatgttcataattactatcactgtcttcttcatagttgatggggggaaggctggatacataaaaaaatggtaatacagtaagaagtgctcagataagaataaagataaaatgttatggagagtccatttttgagctgagctatggaggatgaattaatgtatcaggtggacaagaggaaaactagagaaaatagtcgggagagttgcctaattgttgccctaaactattgaactgttcacttgaaaagggtgaattttatggtatgtaaattacatgagtaaagctcttaaaaaaatttgcagggtgctatatactagattacataagactagagacaaaagctacccaaattttgcatagtactccattgctatcacatccgatcttgttttatcctcacagagcccctttaaggtaggtgtaatgctgtttttcctattttatagatgcagacatcaagggtcaaatttgtcccaaggtcacatagctagtagatggcacattgggtgcttcaactgccatcttctgacttctgtgccctagttttttgaaattcaaggctagattattggtgtttagcaagcttaattgaatgggtgttcagcagatattccacttggttagtagagcagtctcattcaaggcctggttccgtccccagtgtggctcttccagtagtccgtaatagatcaggaatgggtttagcctgctggcctgacccctgattcagtcaccacactgtgaacattccatagggaaaaaactgcagacagtgtatactggcacccactttcatagttttgttttagttttgtggctcctaaatgtctaagactaactagtaatatgaccttgggtgagtcacataaaaaaccagaagctaaaggggttatctgtaaaacgaagagttggactagctgagcacacctagcactcaaaatatatgacttaaacacccacatgcaggcaggcctggtgcacacacaaattatcctttgttatgtagatacgttcatgccaggttggctataaaacacttccagagatttccgtcaatagaagtcagaccagcccggcagcctccaccctaaatgccctgccatatttgtttggtctgcctccctgactccaaagaagcagcaggcagcttaatctctggacaggattcttcatgccactccctccactccagcctgtgttgtcctgactggccaggccagcctctgctctctggagaagcaatgaggtagggaagttaaccagcaagcccctctcctccatcgcctcactggagcttgagctgggtatctctccatgttttgccattagctttacccatccaggacaggggcacaagtgttggtgccaagccctgcactcccagctctggtggatggccaagtcctaccctggggttgaggactgtcagtgatactgagtaagggagtcattgcttgacaactgcctagagagatactttaaaagataggaatgggaggcattatttctacaagtgaacaagtttatattgaaggaacacttgtataggatcatcatggatgggacagttcatctccagtgcattctccaattctgaggatacatcactgcacaaactggactagagtttaaatggtacagaagctgggggtaggggaggcaggaggacaagggggatgggtggagaatgcttaacttggtgttcaaaatcatgttatttatgagccatgtgacctcagagtatctttgagcctgagttcacttacctgtaaaattctgctgtgctactgcatagagtatctgagaaaatgaggcatgcagtcgatgtttggtatttttgtttcatttatttattttactgccatgcctcgagaacaatagatgttcagtaagtatttgaatatgttagttaatgctttaggatttcctaaaggcagtggaatagaattctcactgagttcagagcttttctgataataatgtgtgcttatggagctcctgaatggggtccaatttagcagttgctatagttgctgagatatagcacaaggggcattttttttttttttagatggagtctctctctgttacccaggctggagtgcagcggtgcgatctcagcttactgcaacctccgcctcccgggttcacgccattctcctgtctcagcctgtagctgggactacaggcacctgccaccatgcccggctaattttttgtatttttagtagagacggggtttcactgtgttaggcaggatggtctcgatctcctgacctcgtgatctgcccacctcggcctcccaaagtgctgggattacaggcatgagccactgcacctggcctagaaggggcttttttttaacctttcctgaactgttcctatcgttgaaagaagcttccctatccagtcattttcttagtaattaaactctagagcatgttgtgaaatatccatatgatctaacctttaaaaatagaaactctttagctgtgtaactactaaattctgggtagaagccaaaacaatcagcacttctcatttctgaacttagataatccagttgtactccctcagctcattgtgagttttgacaagttctgcatccatgaacaccagatgtaatacaatagggaatttcaaaggaaggattacacacctaggctctgccctctaggattttaccgtcttacaagggagttgagacaaaagtgagaaaatactctggcaacttctcccaacatcacaactttgcaattctcataaattttgcttgatcctagggcatgaccaaggcagaggcaggcaggtcctacttcatgtgggagagaaggaaggaagggtaggcagttagagtgataggtttggaatactgtagaaaggagagtgggcagagccagagtgaggtgtctgaagcttgtcgcacaggcagtgggaagggtgggttggaggtttctgagcaccagaaaactttgagcattgttccggaagaggcaagcggcaggcatctgcaccagagacactgccgggtccgagtgagggcaggaggctgcacgagggagcctccctgggagtgagcgataggttcgctatgggaggtgggttcgaaaggtgcctgagattttcatttgaaactctgttgaagaggaattggcaatagaggaggaaatacaaatagaggaaagattggtttcgtcttaagcactgaggctgttgggcagctagtggaaagtgctgctggagagaagctggagatcactgaagctgagagaggggtttgtggatataattagagcagtgtttctagggaggtgcaggtgaagggactgagagagagatgaggttaaaaacacagaagagaaagagatggaggtgtggaggcccctgaggtggagcagctgcagaggcaggcctgggggccaggaggctggctctccactttcagctgttggtgagaagggagtgaaggctgagcagctcccattgtgcagctgttgagtgcacaggtgctcgtgctcttgcacacggtggggtttggggagggtgtgatgctacagggaggactttcatgatgcagctgattctcttttattgagagtctgtttctggagtcacctgctctgttttgaatcctggctttgccactgtgaccttggacaagttgtttagcctcagtgccttcgtttctgcatctgtaaaaggggtataataacgcctccctcatcaaactgttgtaggattaattgggttaacatattgagaggtgacagcgtgctggcagtcctcagagcccttgcttgctctcggcacctcccctgcctgggctcccactttggtggcatttgaggagcccttcagtcccccactgcactgtgggagcccctttctgggctggccaaggccggagcccactccctcagcttgcagggaggtgtggagggagagacacgagcaggaaccggggctgtgtgcggcacttgcgggccagctggagttccgggtgggcgtgggcttggtgggccccacactcggagcagccagccagccctgctggccccgggcaatgggggacttagcacccgggccagtggctgcagagggtgtactgggtccccccagcagtgccggcccaccggcgctgcgctcgatttctcgctgggccttggctgccttcccacggggcagggctcgggacctgcagcccgccatgccagagcctcccaccccctccgtggcctcctgtgcagcctgagcctccccgacgagcgccaccccctgctccacggcgcccagtcccatcgaccacccaagggctgaggaatgcaggcgcacggcgcaggactggcaggcagctccacctgcagccccggtgcgggatccactaggtgaagccagctgggcttctgagtctggtggggacgtggagagtctttatatctagctcagggattgtaaatacaccaatcagcaccctgtgtttagctcaaggtttgtgagtgcaccaatcaacactctgtatctagctgctctggtgaggacgtggagaacctttatgtctagctcaaggattgtaaatacaccaatcagcaccctgtgtttagctcaaggtttgtgagtgcaccaatcgacactctagctgctctggtgaggacgtggagaacctttatgtctagctcaaggattgtaaatacaccaatcggcactctgtatctagctcaaggtttgtaaacacaccaatcagcaccctgtgtttagctcaaggtttgtgagtgcaccagtcgacactctgtatctagctgctctggtggggccttggagaacctgtgtgtggaaactctgtatctaactaatctgatggggacgtggagaacctttgtatctagctcagggattataaacgcaccaatcagcaccctgacaaaacaggccactcggctctaccaatcagcaggatgtgggtggggccagataaaagaataaaagcaggctgcccaagccagcattagcaacccgcccgggtcctcttccatgctgtggaagcgttgttctttcgctctttgcaataaatcttgctactgctcactctttgggtccacactgcttttatgagctgtaacactcaccgcgaagatctgcagcttcactcctgagcccagcgagaccacgagcccactgggaggaacgaacaactccagacgcgctgccttaagagctgtaacactcaccgcgaaggtctgcagcttcactcctgagccagcgagatcacgaacccaccagaaggaagaaactccgaaaacatctgaacatcagaagggacagattccagacgcgccaccttaagagctgtaacgctcaccgccagggtccgcggcttcattcttgaagtcagtgagaccaagaacccaccaattccggacacaatgtgaagagcatttaaaatagtgcctaagcctaggacaccgccagtgctttgtaagtctttgggtcctgctggcttaggttgcttctttcggcaggatgactttttttttgagaccagttttcactttgttgtccaggctggagtgcagaggtgctatctcagctcactgcagcctcaacctcctgggttcaagctgatcttcccagctcagcctccggagtagctgggactatgggcatgtgccactaggctcggctaatttttggctgttgttgtttttgtttgttttgtttttttgtttgttttttgagacagtttagctcttgttgcccaggctggagtgtaatggcacaatcttggctcaccacaacctccgcctctcgggttcaagcaattctcttgcctcagcctcctaagtagctgggattacaggcatgcaccccccacacctggctaattttgtattttcagtagagacagggtttctccatgtcggtcaggctggtctcgaactcctgacctcaggtgattcacctgcctcagcctcccaaagtgctgggattacaggtgtgagccaccgtgcccggcctgttgttgttgttgtttttaagagacagggtttcactgtgttgcccaggctggtctcaaactcctgggctcaagcgacccacctgccttggcttcccaaagtgctgggattataggcgtgagccaccacttccagccaggatgactttttttttttttttttttttttttttggtcttctctgctgtgtctctagaagatgaccttttgagaagcaaacctgaatgttgattcaagcccaaatttcctgggctcaggtgttaattttttaagtctttggaacctctttgccgaggtctcaagcaggtagaagacattaataataattccttatatttgattgcgtggtgctctgtagtttactgagtacttactatatatgtacagataggcccttatttgatcttcacaggaacctgtgaggtaggcagagcttatgagcttcatttcccaggtaggaaaactcctacgtggttacgtaacctgctccaggtgtgatcccaggtgcaatccagctcaacaagcacactgagcctcaggagctcttgggatcagaacccaggactcgatcccactccgtgccgccttctcacccacccctcttccaccaagtgggtggaaatagcacttgctttgaaataagtaacgaatgatctttgtgaaaaggaacctaaacagcagtgggccatctttattcacatctatagtaccaagtgctgagtaaggggattttagactccagacacccgtcctgtttgtcaggccagagctgcagtgtgttgactgcacatctgtctcttgtcactcctgctcctgtgggtaaccagccagagtgcccctgaggcagagacaggccaatccctggagagttctgcgaggtctagggaagagttctttgtatttaaaatttcatgtgaacttcagcagtttcctctgcctctgtagtcagcttttgccttttcaaactttagttagatggataatgacttttactcattaggacttttttccattagttggaaacccagagttgcaatacgtttcttttttccttagaatcaccgggtttatgggaataacaattgggattctctttatataaaaatagtggtggaatcttggcacagggttcatatgtggctttgttgaaggcttgttgtcacttccttatttgtataatttccctcctttgtggcctaaacatgactttcaaagagtcaagaggagttaagtcctaatttttattttagaacatctgaaaaatgaattcagagaaaagtgatattgatgccttggatttccccacacatacaaatcccaatctcctgctgactttttctcatgtttttgggcttcagggactgttgtgggatttgtattttgatactgaaggaccaacacagactgacttagcttcttgcctgtgtgcaggtcatgtgccactgtcactggagagaatttcatgttgtgacttctgttcagatttgttttttttttatggctttcccatcagggttcttgggagccatggctgcttcttgatatcttctgtttccctgtagaacagacgattgcaggcccggggccctggcaagctgggccctctgtggctttctgagtccattgtgaggcagaggatcaggtgcgttttgggcagcagccttcagagcaaggcactgacctgatgattcacactgacccctcccctccgctgaattttctgacaaccttgtgactctcacatgggaaatgtgagtggtttttgagaaatctttacataagaggttttaaaattttcttttgagattgcctcggtgtttttccttaaagttagcacattctttgctttctacttcagcctcaaggacaggaagttcattctcgctctttacattggggtgttgatgtttgtggttttgttgttttgttcttcatgttactcatgatgtattgatattaattaacctaaatacatatggaaatattctttcattacttagagcttatatagttcctggtgcagatgtgcaaaaatagtgctttagtaattgctaagtcactatcttgcttttctctctactgtgattgagtatttcttacatggaactatagcttcctcttatcaacaaataagcaggaaatagaaattatgtaaataagcaatttccattacctacttcactgacttgacaaataggcatttggtctgctttaattaatatttttcaaaatgttaagtgcctgttgctgttacttaattttgcaggtagcattggaagtttctgtgattgtacttgagtgggcacttcttgttgaaatttaccattgagaccctggtaacactgaagtttgtgttgactttctgtaggtgttttcacagtcctgtgtttggtatggagagtgtggaattgcatatggggacaagaggtacaattgcgaatattctggcccaccaaaaccattgccaaaggatggatatgacttagtgcaggtaagttcattatcttaggcactgggaacacaaaatgctgatcacaagatcctctgtaattattccttaaatgttattgcagggtggaggtggagatgagactaacaggcttaagtcttatcccggactctcaaactctaacctgtggcatacagtgcagagaaagaacaccgtaactccaaaggcttaatttttcaggggctgactttatacctctcataaagtttcccaatagcaggttgctatttagagactgaccttggtacttcgtatgttgcccttgcagcatctgcaaaatatattagaagttagctggttttgattcctagatttcaggactcaaatggactctgttgctaagtggctttgacgtccttgtcccctggtcatttcagtgttttctctgtgttccactgagagcctgtgaattttggctgctaccaggattctgattcctgttctttttttaccatcctgtgatacacagggatattagaactggaaaaatcatgtgaaaagcctggttttagaggcttaaagtaatcaaaagtcaagtcgacatgataacagagttcctaggctcacttgttcgtttcttttctgtttttgagacagaaggagccttgctcttttatcctggctgaaggctagagtgcagtggcacaatcacggctcactgtgtcctcgacctcctgagctcaagcaatctctcaactcagcgtcccaagtagctgggactacaggcacatgccacaacccctggctaattttttaaaaatttggggagatggggcttcaccatgttgcctagcctggtctcaaactcctaggctcaagcaatccaccctcctcagccttcctaagtactgggagtacaggcatgagccacagtacctgtcctcacttgctgctttcatcataattattaaaggtttcaactttccctggaattactaatagaaatagtaagtagcactctggttgaattgaatcaaacaaacaaaaaaccctaagaagacataaaatgattgtcaggagaggagagaaagcttccaaataaaaagaaaattagaaacatctctacttgtgaataaatagtaaatgtgtagccttttaaaataattctataataactttgcaaatacaggatgtgtcttacccttttgtacttcaaaaggattacatgaatgaatgtgtcttagttcactgaggaatgttgaccttactctaactgttgcctactcccgtgtctgtgctctttcacctgaaaggaactctgtccaggattcttctttggcaatgtcagtctctgttgtgatgttcggcagcttcagacactaaaagacaacctgcagctgcctctacagtttctgtccaggtaggttctgctggggaaacagaacaactgggctgtagatacttgtgaactggtaatgctcagctttccatttattctttgtttacatatttttatttattatatgtctatattatatgtatattatatatttatacatatatgtatacatgtaaagtaggtgaatatatatttatgtattaaaaatacatgtatgtataatgtgtatgcatgcgtgtgtgtataatagagacagagtctcactctgctgcccaggctagagtgcagtggtttgtggtgtgatcacagctcactgcagcttaaacttcctaggctccagtgattgttctaccttagcctcctgagtagctaggactacaggcatgcactaccatgtctagctaattttatttatgtttttctttatttttttttttttttgagacagactcttgctctgtcaccgaggctggagtacagtggcatgatctcagcttactgcaacctcctcccgggttcaagcgattctcctgcctcagcctccccagtagctgggactgcaggcacatgccaccacacctagctaagttttatatttttagtagaggtggggtttcaccatgttggccaggctggtctcaaactcctgacctcaagtcatctacccgcctcagcctggttattacaggctgggattacaggcatgagccactgcacctagcctaatttttatttttttctagagatgagggtctcactatgttggccaggcctggtctcaaatgatcctcccaccttagcctcccagagtgctggattataggtgtgaaccacagttcccagccagtttttttttttttttaaagtcagtttttgttttgttttaagaaagcactcttacaatttgtcagaaataaagagaaaaacaataattaccagacttggttcacttcccagttgcattcagagttgatgcttggtttcctctgcgatgttctcaccctgcagggtgtctgcactgcggccaggctcctttcaaacttgagctgtgcactgtggggaagagaggttcctaggggtcctgctcaggtgcctggcctgagactctcatcatgcagtccttcctctccccccatgctttgctttgcacatcattcttgtccctccctctggtgaagggttgtgatagagtcaggtcctcagtagagccggcctcggggagctgttaaaaattttgttctgctgtagctggctggttttgtcaaacttagttttttatctgttctgttggctatgaccctgagcagtgaaaaagggcttggtaatagatgttcttctctaggcctagccagcaattctcaaatatgcaaaagagcaagctggtagtggtctttagaacagcagattgtggtatctttctaaatttttcagacttcagcacactgataaagatgtttgggaagcaaatattaaaaagggaaaatgcttctctgcacaaatatcactgcaggtggtgatagggcacaagttggcttccagtgaagaaattctgcttcttaccaaaagttaacaatagagaatggaaaaccaccactaaattgttttttcagaacaacaaaagttgaggctgtaattgggccagcatatcctatgaaaggcttgtgaacattgatggaaccaaattggagccttgtacactcagtcaaaacacatttatttaggatccaccgtaggtgaggcattatggacatacggacataaacataaaaagatagccaacctttctccatattatcagaggtaccaaagcttgatttataatagcaaacaggagaaacaacctgatatttggaaaaatatacagctgtcaaaattagtgattgtgggcattaaatgtagtaacatggaaaaggtttgaaaactgtgtaccccaagagtgattcctattagaataatacaattgtggtttctggctttgttgcagtaaagcagtggggctcctgaaagaaagagagtctgtgcttctctgtctccttcactagaacagagactcttgaaggccaggacacacttttttcattctttgtcttacatggtcactgggactgaatcggagtctaaagtaatcttgattgcaagaatgcaagtctaatgaaacagcttttgcaagtaacagtggaccaaagggaaaagagagctcttttatcatgtaacaagtcaacattaggagcttaaactttgaacctgaaggatagcaggcagcttatggttcttgtgcagttgtgtgctcctgaagtgcatgcagccagagaacaacattgctgttctctatctttacaaaccatggggatttctccttgtgtttcaggagggcctagtgattttccggggcttgaaagaaaacctttcaataggttataagatgaagattctcataattctcattattttattttcttcttaatcaaaactgtcagctggtgcagcgctcatgtcgataatcccagcactttggaaggccaaggcaggagggttgcttgagtttaggagtttgagaccatcctgggcaacacagacccacatctctacaaaaacattttaaaaattagccaggtgtggtggtgtgcacctgtagtcctagctacttgggaggctgaggtgggaggattgcttgagcctaggagctcaaggttacagtgagctgtgatcacaccactgcactcagcctgggcgacaaagtgagaccctttctcaaaaaataataataattgtcttcctgatgctccaaagtccctttactctaggtcagagaatgtatgtctctaaattataaagtgcagaattcagagaagcatctctctctttttgaaattataattggacacaataaatgcagaaagtaattagggcattttttaaaggtgtgcctttattttaacatgaagttttaagtttagaattgctggtttttaatatgttctcttggtaatttgtcactttacagtaagtttaaaatattctttgtctatttaaaatcgttcttgctggccctattatgtgtgagatcatgcagaatataatttacttttcctttagatgtccatcctgtttttataacctactgaacctgttttgtgagctgacatgtagccctcgacagagtcagtttttgaatgttacagctactgaagattatgttgatcctgttacaaaccagacgaaaacaaatgtgaaagagttacaatactacgtcggacagagttttgccaatggtaagtaaacttttaattattcctcttttacagctggcatcaggacagcagagcaaattgttccttttagttgtcctgtcaactctggaaaatcacaattttcagttccattggccaggaaataagagttgttgctttgcttgtatcctaggacttgaactgcaacgaatataaaaatctccttaaagcgcttgctttaactccccctaactttaacttcccacatggaaaattttagtatgtgcaagtttgcatccatacacttcagtaaccattggatctttgactctaacagacatgagttgtgtaatgtcataaattactgcaagactgagaagatagaactgttaatagttggcagagaagaggtcatgacttgcaagaatcagatcaccataaaggaaagtcagcaggtctaacagatagcagaaatgatcccccagcattgaccaacatacaacatttaattataatgacaaagtaaaaaggtaacaaaaaaattccatagaaaaaaggtctcattcacaaaagcaacaaaaaataaggcacttaggaatccaaaagatgtgacatacaaggcaacctgactgaatggagagaggtcattttgtccagaaacagaagcctgcatgtatggaaagtggatgtgtaacacgtgtgtcattacaaatcattgagagaaaaggtgggctagttgataaatgagatgagaaaatagattatatttatctaattttaatttttacagaaaataaaaaaatcaattgtgtagattaaaaatcccaattggaaagttttagaagtaaatatggaaagatttctagacaggagaggaaaagcagaaaccataagaaaaatatttatgaatataaacaactgttatctagagcagacagcgaaatgcaaatttgaacagtaaactaccatttcacacctcatcagcttggcacaaattaaaaagttggtcaatttcaactgtgggtgaaaatgtgaagcaataggaatactaatgtactccaccacttacaaccataatttggtacaatcgtttcaaaactacttgaaaaacaactttgcagtacgtagtaagttgaagctaaccctcctcccagaaatttcacttatagatgcctgccttagagaaactctaaatgcatataaacctggagacccatataagaacacccactgtaacactattgtgattgtgaaaaattgaagacctcaagaacgagaagacaagacacagactgggagaaagtatttgcaaaagacatgttagtaaggactgttattcaaaatatacaaataactcctaaaactcaataagaaagcaaacagcccaattgaaaaatggacaaaacaacctgaacagatacctcaccaaagaaggcatacagtggtaaataagtacatgagaagagatgctcaacattatgtcattagagaattacaaattaaaacaacgagataccactacacatctattagaatggcaaaaattcaagacgctttcaacaccaaatgctggcaatgagctctcattcattgatggtgggagtacaaaacggtacagccaccttggaagataatttagcggtttcttacaaaactaatcatactccttggtatttacccaaatgagttaaaaatgtgtctaccccaaaacctgcacgtggatatttgtagcagctttgtccataagtgccaaaacttgtaagccaccaagatttctctcagtaggtgaatgggtaaataaactgctacatccacacagtggaatattatttggtgctaaaaagccatgaaaattcagtgctatcaagccatgaaagtacatggatgaaccttaaatcctattactaagcaaagccaatctgaaaagactactcactatgattccactatatgacgttctacaaaaggcaaaaccgtggagacagtaaaaagtcagtgattgccatgggttaggagagaggaaggcataagtagagcacagaagatttttaggtggtgaaaatactctatatgatactataatggtggttacatgtttatatgacattttgaaacaaaagtactacatacttaaaacaagtacacaaacatgcatgggaaggataaacatcaaattcaggattgtgtttaccttagggaaggggctactgtcagggaggggtaattggggagcttcaactgaatctatagagtgtgtgtgtgtgtgtaagtattttattttttggaagagacgggcctcactgtgttggtgaggctggtcttgaactcctggccttaagtgatcctcctgcctcggcctgccaaagtgttgggactgtaggtgtgagccaccacacctggcctatagtgcattattatttttatttagtttttaaattatgccatagccagttgttctgaatagtgcagtactacaaaacagagtcaaggtctcatgctgtcacccaggctggaatacagtgatgcaatcatggctcactgcagcctcaacctcctaggttcaagtagtccccctgggtagttggaaccacaggcatatgctaccacacctagctaattaaaaacaaatttttttttgtagagatagggtcttgcttttttgcccaggctggcctcaaactcctggcctcaggagatcttcccacagtgctgggattacaggtgtgagtcactgcacctggccgagtccattatttttttaatgttgaggcaaatgttgtgaaatggtatgactgatagttaactgggtaatgaggaaatgagaattgtattattctccatgtgttttgtatgcttgaaacataaaataaaacctgaaaaccaaatggtgagctggaagatacgagggaattactcagaaaacagcatacagatacaaagacctataaatcattaaagaaatgacatataacatgagaagctccagagagttggggagagacaataataatcaaagggataatgaggattttccagagtggataagggatgaaccctgagaacttagagaaaattcagcatacaaaaatcagttgtatttctgtacacttgcaatggacaatctcaaagtgaaaataaaacaattccatttactttagtatgggaaatacttaggagtaactataacagaaggcaaaacactttaaagaacagccgggtgcagtggctcacacctgtaatccaagcactttggaaggccgaggcaggcagatcacaaggtcaagagattgagatcatcctggccaacatggtgaaaccccatctctactaaaaatataaaaattagctgggcgtggtggcgctcgcttgtaatgccagctacttgggaggctgaggcatgagaatcacttgaacctgggacgcggtggttgcaggagctgaaattgtgccactgcactccagcctggctgacagagcgagactccatctcaaaaaaagaaaaacagaaaaaacacactaaagaacattattcagcgaaattaacgaggatctaaataaatggaaagacattccatgtttatcaatcaaaagacttaatattgtttagatatcagtattctccaaattgttttatagattcagggcaatctctgttataatcccaactgacttctttgtggaaattgacaagctgattctgaaattcacatagaagtttgagggacttagaatagtaaaacaaccctgaaaaaagaacaaaataggaagactcacacttctcagtttcaaaactaagcaatggaaatcaagacagtggtactggaataaagatagacatatagatcaatggaatataactgagaataaataatatatctatggtcaactgatttttgacaagggtgccagggccattcaatgagaaaagaatactcttcatcaaatggtgctgcaataactggatacacacatgcaaaaataaataaataataatgaaattgggccctacttcacaccatatgttaaagaaattaactcaaagtggatcgaagacctaaatgtaagagctaaaaactataaaacaataaaacatagggattaatttgcatggcctcatatttggcacttgattcttaaatatgacaccaaaaacaagagcaataacagaagaaaagattaattggacttcattaaaataaaaaagtttgtatttcagaggacgccatcaagaaaagacaagaaggccgggcacagtgactcacacctgttatcccagcagttcgggtggctgaggcaggaggattgcttgagcccgggagttcaagaccagcctgggtgacaaagtgagaccctgtgtctacaaaaaataattagccaggcatggtggcatgtacctgtggtcccagccacatggttatctgaggcaggaagattgcttgagcctaaggaggctgcactaagtacctcgcactccagcctgggtgacagagtgagactctgtctcaaaaaaaaggacaagaatatatttgcaaattgtatatttgataagggacttgtatctagaatacataaagaactcttggccgggcgctgtggctcatgcctgtaatcccagcactttggggggccaaggcgggtggatcacctgaggtcaggagttcgagaccagcctggccaacatggtgaaaccctgtctctactaaaatagaaaaattagccaggtgtggtgatgtgcgcctgtaatcccagctactcaggaggctgaggcaggagaattgcttcagcctgggaagtggaggttgcagtgagctgagatcacaccattggactccagcctgagggacagagactccatctccaaaaaaaaaaaaaaaaaactcttactactcaatgataaataaataacccaatttaaaatggcaaaagatctgaatagagtagacatttctctaaggaagatatacaaatgaccaacaagcacatgagagatgctcaatactatgagtcatcagggaaatacaaatcaaaaccacaatgagataccacttcacacccaccaggatggctagaatcaaagtcacataacaagaagtgttgacaaggctgtggaaaataggaacctttattaaaaagaaatccaaaaaccaaaaacagctgggcacagtggctcatgcctataatccagcacttcggacggccaaggcaggtggatcaccttagctcaggagtttgagaccagcctgggcagcatggtgaaactccatctctacaaaaacttagctgggtatggtggtgcacatctgtagtcccagctacttgagaggctgaagtgggaggatcacttgagcctgaggggcagaggttgccagtgagctgagatcacaccactgcactccaatctgtgtgacagagtgagaccccactttggaaaacagtttggcagttcctgaaacaaacatagaactaccatatgacccatcagttccactcacaagacgaaagtataggtcaacacaaaaacttatacacaaatgcttctagcagcattactgataatagccaaactgtggaaacaactcagatatttatcacctgatatatggataaacaaaacatatgtccttgcaatgaaatgttgttcggccgtaaaaagaaatgaagtattgatacatgccacaatatgcatgaaccttgagaacattatgctaaatgaaagaagccggtcatgaaagaccacatattatatgattggatttatgtgaactgtctgaaatagtcagataaatagagacagttcagtggttgcttagggcttagggaagtagggaggtagttgtgcatagctagaatacaggatttcttttgaggtgatgaaaatgttataaaattgactatggtgatagttgcatatatctatgaatatgctaaactccattaaattatatagtttaagggggtaaattgtaaattacatgtaattatattgtaaattatatagcgccaccacacctggctaatttttttttatttttttattttttgtagagacggggttttgccatattgcccaggctggtctggacctcctgagctctggcagtccacccaccagggcctcccaaattactgggattaaaggtgtgcataaccacccctggcccaaagacaaatatcttaaaagcaaatagagacaagacacaaatcaccttaagacaatgataattggagattttcttaccagccatgatagagcctggaaggcaatggaataatctgttgagaattctgagggagatgactgtcaccctagttaacctgtctttccagaacaagggtaaaacaaaatgaatgtgtaagcatctccttgaagattagggaaagaagatcctgggaagtttctagcaagcagagactggtaaatgagaatcgacagtacaggacccattccagctattttcttaggtgtaatacactgatactatccttatataatgtgttgtgtgtatgtgtaagaaaataaaatccaaaaagataacagtattaggggttttttttgttttttttttttgtttttttgtgatggagtcttgctctgtcacccacgctggagtgcagtggcgcaatcttggctcacttcaagctctgcctcccgggttcatgccattctcccgcctcagcctcccgagtagctgggactacaggcgtccgccaccacgcccggctaattttttgtattttcagtagagatggggtttcactgtgttagccaggttggtctccatctcctgacctggtggtccgcccacctcggcctcccagagtgctggaattacaggtgtgagccaccgtgcccggccaacagtattaggtttattgacacgtgacctctgctctaaaaccagttttccaagtaagttccataattctctggctgtgtagcttcctgcggcagaggttttctggaaccagctttgttaactgaagaagtactgaggctcttagctgcgtcttcctgggccttggtatactcttctatatagtggggatttgacttctccaagctgttgtgagagctatgagataacgtgtgcctttccctttcctgtctgttttttacttttaagttacttggaatcgggcctccatattatttgcagggtgataagccaatttaaagggaatctctgttcgtgcccttagttagtgtttgctgtccagcattccagcatggtgcatatggagttcgtgtttcccttcaagaggccttttgtaagatcttgcctcgtgaattacagcaagcatcttgtctcctttttcctttgggtttcctcttctagcaatgtacaatgcctgccgggatgtggaggccccctcaagtaatgacaaggccctgggactcctgtgtgggaaggacgctgacgcctgtaatgccaccaactggattgaatacatgttcaataaggacaatggacaggcaccttttaccatcactcctgtgttttcaggtaggtataaagattccaagtttggtgtgtttatgatattgttttaaagccaaggaactggctgggcacagtggctcaccagtgcttggggagactgaggcaagagaattgcttaagaccaggagttccagaccagcctgggcaatgtagtgaggccccatctctatgaaagaattaaacattagccaggtgtggtggcatgcatctgtagtcccagctacttgggaggctgaggcaggaggattgcgtgggtccaggagttcaaggctgcagtgagttacgatcatcccattgtactccaaccttggtgagggcaaagccctgtctctccatgaatgaatgaatgaatcttagttgaggaagcataatctacaataggaagataaacacattcaggtaactagttcatagtttctcccagtaagagaggtaactggtacatttatcctgctgtggctaatttagggggtgctgggagtgggaatggaggaggaaatgaattgccttcaggcattgctgtcataattgaaagaataagcagttaaaaagggggtgggaggcagcttttctagagctctgctatagtattagctcctgagaatggagatgggacatgattgaagggttgccttggtatgtggtgtacttggaggattcctctatcagtgacaaacccctacgcgcaagtttattgaggtaacttaaaattccataggacgaagcagcaaaacataatttaattaaactaaaacctccaattctttttcttctttcagttgttttatgtatttcagtgggcttttctttgagtttaagtataatacaaaattttggatgtttttaattgagatttgtactcaacacaattcctttctgtagattttccagtccatgggatggagcccatgaacaatgccaccaaaggctgtgacgagtctgtggatgaggtcacagcaccatgtagctgccaagactgctctattgtctgtggccccaagccccagcccccacctcctcctgctccctggacgatccttggcttggacgccatgtatgtcatcatgtggatcacctacatggcgtttttgcttgtgttttttggagcattttttgcagtgtggtgctacaggtaagcagttttgtttgtcatccagggcaaaaagagcaaaattgcccactggcactttgagctttcatttgtcagagcttggttacttaggacaagaaacaaatacctccatgaataccattgcatggattattgtgtcctacagctattctatagtaaaccatcaaagttctgtttaacactgcaacatctgaaatgaattttactgatttattcaaaatgatgtgtgatttaaagcactgtgcattagccactgattctttttttttttggagactgagtctcactcttgtcgcccaggctgaagtgcagtggtgtgatctcagctcactgcaacctccacctcccaggtttaagcaattcccctgcatcagcctcctgagtagctgggattacaggcatccgccaccatgcctgcatgcctgactaatttttgtatttttagtagagacggggtttcaccgtgttggccaggctgatctccaactcctgacctcaggtgatctgcccgccttggcctcccagagtgctgggattacaggagtaagccaccgtgcccagccggccactcattctttagaaagtcagagtcaaggccaggctcagtggctcacacctgtaatcccagcactttaggaggccaaggcaggagaatcatgaggtcaggagtccattgcaaacagccctggcgacagtgcgagactgtgtctcaccaaaaaaaaaaaaaaaaaaaaaaaagtcagagtcaaatgagcgaaatcagattcaaatctaattaaatggagtactatagtccttttagatatttgcatcttaatttaggacagtactttttttactttttattttgaaataattgtagacttaaccaaaaagttgcaaaatggtagaatttatgtgtatccttaacccagtttccccgatgatacaacttacataactcatagtacatctagaactagaaataccatttgacccagccatcccattactgggtatatacccaaaggattataaatcatgctgctataaagacacatgcacacgtatgtttatagcggcactattcacaatagcaaagacttggaaccaacctaaatgtccaacaacgatagactggattaagaaaatgtggcacatacacaccatggaatactctgcagccataaaaaatgatgagttcatgtcctttgtagggacttggatgaaactggaaaccatcattctcagcaaaatatcgcaaggacaaaaaaccaaacaccgcatgttctcactcataggtgggaattgaacaatgagaacacatggacacaggaaggggaacgtcacacaccggggactgttgtggggtgggggcctgggggagggatagcattaggagatatacctaatgctaaatgacgagttaatgggtacaacacatcaacatggcacacgtacacatacgtaacaaacctgcacgttgtgcacatgcaccctaaaacttaaagtataataataattaaaaaaaaaactcatagtacaatgatcaaaaccacgaccatgccattattattacattattattagctaaaccagagatcttaatcagatttcaccagctttttctctaatgcccttccctgtttcaaggtcccatattacatttttgtgttttatgagtcccctctaatctgtgacagaaagttcctcagtctttccttttctggccttaacactcttgatgatactggtcaggtattttgtagcatgtccttccatttggctttatctggtattttctcatgatgagattgaaataaggtgttttgacaagtacatcacagaagtcatgttatgtctttctcggtgcatcatgtcagggatccctgatgttgatgcgtctctttcctggtgatgttaaccttgatcacttgctcaaggtgatgtctgctggctatctccactgtgaagttactgcttttcccttcgtaattgataaatatcttgggggaagatgctttgagactatactaatattttgttcctcctgaaactcaaccactgattttagcattcattgttgggtcttgtctgcaacagttataactaaggtgtttgcctgatagtgatttttttctctttccctctcttcctctgcatttactaactggacttctgtacagaaagctatcccttctccctcatttatttactcagttatttacatcatggacttttaattctgtgggttgtatccaacactgtcatttatcttgttactcaaagttttccactttgggccattgggagtgccttctggctggcttctgtgttcttacatacacctcccatccccagctttatcttacatattccctgtccctgccctgcaaggagctctggttccttttattggagaatggtatgtagaaacgaagatctgggcactaggtatgctcattgctgctggaaagagtagcatgtttttgtttgtttgtttgtttttttgagatggagtcttgctctgtcaccaggctggaatgcagtggcgcgatctcagctcactgcaaccaccgcctccctggttcaagcagttctcctgcctcagcctcccaaggcacgtgccaccacacccagctaacctttttgtatttttagtagagacagggtttcaccatgttggccaggttggtctcgatctcttgacctcgtgatcccgcccaccttggcctcccaaagtgctgggtttacaggcgtgagccaccgcgcctagcccagtagtgtgtttttaaaggacctaaaagttttaaataaaatgagggccacaaggtgaaattatcctttattaattgttctcttaacatcttcttaaattttctcctgagactggtgagcagagggacccagagcaaggggacttaggggaaagaaggcagtaattagggaggaggaggccaggaggaggaagaaagcatttcatgggattacaggaatgtcccaaaaacaacctcactgtgatgaagtccactaatgctatttcttcacttctgtttttcagaaaacggtattttgtctccgagtacactcccatcgatagcaatatagctttttctgttaatgcaagtgacaaaggtaggcatatttgtccatgaataaaagggttcagatgatgctgtctgtcatgagagcattcgtttcctcagtggggttgcagcagtgggtgaggtggtgtgccagtgccgaggacacggctgcgaccaaggcagacatggtccttgcctttgtggccctaccatctagtcagggtggcacagcagaaccaagtaattaatcatagctggggaggcgcgaaagcagcaggacaagagtgggaatagcagggcagggttgaacctcacccttcagaggctcctgtgtcggcatctcctctgtggggtgggaatagcgctcattgagggcagccaacaaaggtggctttgctgagcagataggtagctgagggcaggggtctcatatgtgtccccaggtgggcttgattcctgccatgagatagcaactaatgctttccctgttccgactttcaggaacggcttggctcttaacctccaccttcccttcctctcccgttcttccaggagaggcgtcctgctgtgaccctgtcagcgcagcatttgagggctgcttgaggcggctgttcacacgctgggggtctttctgcgtccgaaaccctggctgtgtcattttcttctcgctggtcttcattactgcgtgttcgtcaggcctggtgtttgtccgggtcacaaccaatccagttgacctctggtcagcccccagcagccaggctcgcctggaaaaagagtactttgaccagcactttgggcctttcttccggacggagcagctcatcatccgggcccctctcactgacaaacacatttaccagccatacccttcgggagctgatgtaccctttggacctccgcttgacatacagatactgcaccaggtaacctgctgtttgaagaaataagtcactctagatgaccttgtggtttgctggcttttacatgttgactactgctagatggggatttggggctgaatgtcatggtatatcttgaaaatcttagcgtataatggcaaagctgcctttaagttaggtttcaagaaagtgaatgatgttgaacttaatggaatatttattgttgctcacttttgtatttacttcagatagtagaccttgcctttttcttgaaattgagatgagcagagaaagaagacttcagtggcgtttctctattgaggcaggatatatttattaggaagtcaccttaggaatttgtgaaatgttttctgttggtaactgaaagtaatatgcaaggacccagaggcatgaagcccttactgctgtcctgggggctgaggaaggagctgccagattaccatccctgatccaacctgtaggaatgaacttatcactcactgcctgaacatgggcacccagcctgtttttggtgagaggcgcatttggggcaagatccatcccattgctcctagaaaggcatgtaaaccttcccattgtccctgtcacacttgccttggagaactgtacctgtgcataaactgtaccggcttcttttttaatgaatgtataatcacatggtttttcctttaaacattgctcatgtctacaagaaagtctgcaatcttgaaaagcattaaaatggtcccaagacttgaatcttttctctacccagtgactgtctgttgctttttccagcttgttgctgaaggtgaacagcatagtcatttacctccaagatcatcttctctgttaggaaataaggggacatatataaatggctgtagtgcagagcaaggcaggaggttatgtgttactattgagaggagggtcagggagaccaggagtccccctccactctcccctctggcctgctggccaccactggagaacggtggaggggagatggttgtgtgtcctatgttgatagctgttctggtcatggtgttccccctacccctcgccgcctctgtggacgcctctaactagtttgctgttagagtgggcctgtggcctgaccagttttcttactgtattgcatcttaattctctccctcatcttaggaagtattttccccaaatactctttgtcttctgaccctcagggcaatgctgattaatcaagatctgagagaaatgtgacgtgtttctgggtttgcttatttttaaaatcttctttcaggttcttgacttacaaatagccatcgaaaacattactgcctcttatgacaatgagactgtgacacttcaagacatctgcttggcccctctttcaccgtataacacgaactgcaccattttgagtgtgttaaattacttccagaacagccattccgtgctggaccacaagaaaggggacgacttctttgtgtatgccgattaccacacgcactttctgtactgcgtacggtaagtggcaagagacaatcattggtagacaccattcttgggtctgacttagggtacatgggcaaaagcttgttttatgagcataacccagaggtgagcaaacaacaagaccttgccctgtgaagtttacatcatcttttttttttttttttgagacagggtctcgctctgtcgcccaggctggagtgcagtggcgcaatcttggctcactgtaacctccggctcccaagttcaagcgattctcatacctcagcctcctgagtagctaggactacaggtgtgtgccaccacgcccagctaatttttgtattttcagtagagatggggtttcgccatgttggccaggctggtctcaatctcctgacctcaggcgatccgcccacctcggcctcccaaagtgctgggattacaggcgtgagcttccatgcccagctggaagcttacatcttaatggagggagacggttgatgaacacataacatgtgctatcgtgccagctagagattagtgctatgaggagaaaaataaggctggacagagtggggggtgcattgcttaagcgtggagatgtgcacaaagggagaggaaaggacagctgggcacatcacagggatgagagttcccggcagaaccagcagcaagtgcagagccctggcaggaagctctcgtggtgtgtgattgaggagtgcagctgcctctcaccctttacctcgtgcctgggtcgctaacacagtgtcatgtatcacaccccccacaagatttaaagatagaagagcctttggtgccttttgttctgtctcagatatatagcccagtcccctgtagtgccccagctatttgggaggcagcctccctctgaggagttgaggcagtataggtctgcagctccgcagctttagattggagggccctgcagctgcttcccttaggaggcatgtctagctgggcagggtgcgtttataattgggaatagtcaccccaggaagcggtgctttggtgacctgtaggggaatcttaaggcttctcccagtaggggaagagtagcatgatgccggatgggcctactctccctgaatgctagggacctggcctagggacatttgttcagccagttgagcaaccacagtggctatttcttcagcatgggaacagagaaattattcctttttgcctttaaggacactgctcagccgactacttctcaagagctaaggactctcacttctggttctaaagaactttgaccttgagttctgtttgtttgttactggagtaagactttttatgcagttgggctatatttactctgtttcaagaatatcacccctaaaaacatgagttatactcatgaaaacacaatagcttatgctccataccctaaaccggcattctccacagggtagacggtgcagacgagccatgggtaatttgaagaaacaaaaaacatttaatgttacataatttttataattggacaaccatttaatgttacataaattttatagtttactctctgtggcacaagataaaagtcaacaaaaatgatgggggacagaggtgcgtgagccttgtgtttcctcaaagcggacgtggttcccaccagtgtggaagcggtacagggagtggcaggctcctggtggcagggacctgaattggtttgtagttatgcttgtgcgcgtcctcataaccccagtctcgccctagcgctgtcccctttcctctccctccagcttttcctggactttttcacctgagggtcctgcagtaatggcaggtggcctgcccagaaccatgcccttacctgcttcttctccccattttgtttaaaggcagtgacagctaccagttactcaggcttgaggctttatccctgaattctgcctcgccctcgccttcctcatggggttcttacgggtctgagcctctggatgctctctcagatttctgctgtggatgaagggactcagctgctcgctgcaggtcacctgacctccctcatgccgtcacccatccactctgacgggtgggtcatatgcagaagcttctcagcacctggccaagttgtagctgatggtctgtccgaaaatgctggttcactctccactggccaactgtctgtctgcactgcactgccagttgcctcttgcctgcgccattgcgctaacatctccacttactgttccacctgcttcctgtttctttgccgtttccagaccttccactttgccacgcaagctatctttgtaaaacagctcatgacatttctttcccggaaatctctaattgttccccagtgcctccagaataaaaatccaaactacttaactggcactgagtccttttattttgcatttgtctgtccattactcttcccagactggccccctccttcaggagcccccttggtgggcaccccatgctctaggacaggacatcttttctttgaattattattattttttttttagagatgggatcttgctatgttgtccaggctggactcaaactcctgggttatagccatccttctgcctcagcttcctgagtacttgagattaggcgtgccaccatacccggcatacaggacttgccaaaccaccatcttgctctcattccctctcactgttctctctccctccctttttcctcccacagttgtaattgtgtgagacacccttttgtcctccctctttggtgaaatccccctcatcctcggagctctgggtctgtacagtctcttcctcttggctataattttgccttttagtgtttgctccctcctctgtgcctgcatagcgccatgcaccatgtgccattgatggcactgggctgtatttgcctgcctcttgcccagtgattctgagctcccaaaggtgagtgctgagctgtattactcaactgagaaacctcagggcccatgttgtccttagaatacagccagcctcatcaaatgttcactgtgtaaatgtttaggtccctgatgtcttgaggcccttctaactgggaggtgttttctaaactttttggcagggctcctgcctctctgaatgatacaagtttgctccatgacccttgtctgggtacgtttggtggaccagtgttcccgtggcttgtgttgggaggctatgatggtaagtaagagaagctttgacttttccttttagataaagtcatctcggttttgtcattagcatcaagtggtaattatgaagatttcataaattgggcagttttgttaatttcttacctcttgaatcccagaatagtatctcctttggctttgggtttgggtttcattccagatttaaaagaagtggattgggttagccatttttaggtcacacatgcctttgagaagctgtcgaaggctaagtacctttccccagaataatgcaattgcaaacctctgcattgttgttcagcttgaaggtcatgggcctccgaagttcatttatagaccctctagggagctcatggacctcaggtaagagcctctgtgatagagaaaagatagtatgtgaggtatgtggaaaaagaaacaaagttgatggattttttttcttctaagccagtcagttgagtatttggacactcttacagtgtgaagagcagctggtttgctctttcctggttcctgtagcactttagaaccaattgtacttgacaaaatgaggtgattattcatgtgacacctttggcatcttaagccaaattacaggctcaacaggttttgcccaaccagttaagaatccagataggttttcttctcctcacttggtggcaggggagaagttgcaatctgtatttaaaatttactgtgcatcagagaggaaaatgccatttctaattgttggagaagggatggtgtcagcaactgactagccataggggaaacaattgactttgatctctgacttgttcatttcaccaaaataaattccagatggataaaagattgaaatgtaagaactgggccaggcgtggtggctcacgcctgtaatcccagcactttcggaggccgaggcgggtggatcacaaggtcaggagatcgagaccatcctggctaacacagtgaaaccctatctctgctaaaaatattctttaaaaaattagctgggtgtggtggcaggtgcctgtggtcccagctactcgggaggctgaggcaggagagtggtgtgaacccgggaggcagagcttgcagtgagccaagatcaagtcactgcactccagcctgggcgacagagtgagactccatctcaaaaaaaaaaaaaaaaaaaagaaatgtaagaactggaagaaaattcaggaggcatttttaaaaataatttttaagtggaaaagatatttctaagcaagacacaaaactcagaagcccgaaaaggaaagactgatgaagttgagtacatgttcatttgtggagaacaaacatacagttaaaaaaacaaaactgggccgagagttattcatgcctgtaatcccagcaatttgggaggcagaggcgagcacatcacttgagctaggagtttgagaccagcctgagcaacatggagaaaccccgtctctgcaaaaaatacaaaaattagctgggcatggtggtgcatgcttgtagtcccagctactcgggaggctgaggtgggaggatcacttgagcccaggaggttgaggctgcagtaagcgagattgcaccacattccagcctgggtgacagagcgagaccttgccagaaaaaaaaaaaaactggacaaaaatattagtatgcatggcagtcagcattttcttaataaataaagatctcatctcagcctggccaaaatgtgaaaccctgtctctactgaaaatacaaaaaaaattagccacacgtggtggtgtgtgcctgtagtcccagctactcgggagactgaggcaggagaatcacttgaatcctggaggtggagtttgcagtgagccaagatcattccattgcactccagcctgggcgacaagagcaagactccgtcttaaaaaaaaaaaaaaaagttgtgaaaaaaagatcaacaacctgaaagaaaagtgggtgaggtcatgtgaaagataacaaaagaagaaatacaaaaaaaaaaggtttttattttatttttcagagacagagtcttgctctgttgtccaggctggagtgcggtggtgtgatctcggctcactgcaacccctgcctcccaggttcgagcaattcttctgcctccacctcctgagtagctgggattacaggcatgtatcaccaggcccagctaatttcttgtatttttagtagagacacggttttgccttgttgcccagactggtcttgaactcctgacctaaggtgatccacccaccttggcctcccaaagtgctgggatcataggcatgagccaccacgcccagcctcagtaaatattttcttgactaaagtaatgaaaagggaggccaaggcaggaggattgcttgagcctgagaagtcaaggcttcagtaaaccatgattgtgccactgcactccagccagggcaacagagtgagatcctgtctctaaaaaagaagaaaaaaaggaatgaaaaatagttaagcttctttggaaggcagtttgggagaatttatcaaaattggaaatatacatagtttttgattcattgattatgctttaagaattgattctagccaggtgcagtggctcatgcctataatcccagcactttgggagggcaaagcaggaggattgcttgagcccagtagttcaagtccagcctgggcaacatgacaaaatcccatctctacataaatacaaaaattagccagcaatggtggtgcacacctttagtcccagctactgggaggctgaggcaggaggattaattgagttcgggtggtcaaggccacaaaaagccgcgattgcaccactgtacttcagcctgggcaacagaacaagacactgtccccctgtcaggcccccaccccaaaaaaagaaaaaagatttatttctacaagtatgtgttttacacattaaaatatttataggctatttatagtaactttgtaatagaaaaaattgcaaaactactcatcagttgggggggattggctaaagtataccagaaaatactgtaggaaaagaataaggaaactctttatggagcagtctccaagatacaaaattttaaaatgtaatgtgcagaatagtattttactgtttgtgtggttaagagggaaaggggaagaatctgtgtgtttgcttgtgtgtgtgtggagtggctctggaaagattcgcagatggtcacagtatggggaggagaactaagacaatgaaacagatgttggagaaggagagaattttcgataaacacttttctgttctgtttgaaattgttaacatgcatgtactgtatcctttaaaaaaaaaaaaaaaaagagttactcttcctgaatgataaccatgcctacctcagataaaaaatcctttttattcattaactgaagtacataaagactatttcagcaaactcttgtttaattcttagagcccagagatacagtccatagctccagtgagaaatctgtgttgtgatttttcccctggtatgtgtctaattttctgcatgcttgtaatctgctttttgatgtcacatttttcctttctagatcaaaactacaataacgccactgcccttgtgattaccttccctgtcaataattactataatgatacagagaagctccagagggcccaggcctgggaaaaagagtgagtcactcatgggtgtgagcagactgtccttgcattgtgggaagctagacacttgcggcaagcacttaaacttcattttctaaattaaccaatggcagatctgagttacgtagttttgttcacttggtactaatgatgctaagaagaaactgtaaacacatttacctttgagcaggtgctttaaacagctctccctccacaggaatgcaaaagtgtgcaaaaaaaggttccttgcattgtttttacttatttcatttattttttgagactgggttcacttttgcccaggctggggtgcagtgactgaatctcagctcactgcagcctcaacctcctaggctcaagtgatcctcccacctcagcctcctgagtagctgagactacacgtgcatgccatcacacccagctaatttttgtatttgtttgtagaaacagggttttgccatggtgcccaggctggtcttgacctactaacctcaggtgattcaccctcctcggcctcccaaagtgccgggattacaggtgtgagccactgcacccagccacctgcattgttttctaacagcaaaacttgggagcatgctgaatgtatttaataaggaatgaatacaatagaatattgtgctgtcataaaagacagtgaagtaaatggtccatgatgtatatttgtataaatatatattgtttatgctgctgtccatgcttagaaaaaaatatcaagcaaatgacctcagaaattaactgtgtttgtgacctctagagaatgggaagagaggacttaggaggccaggttgcactttatgccctccagtacttttaaaaaattgttttactgagatatggtatatgtatcatgcagttcacccacttaaagtatacagttcaggctgggaatggtggttcacacttgtagtcccagcactttgggaggcccagacgagaggctcacttgaggccgggagttcaagaccagcctaggcaatgtttgcatgtctctaaaaaaaagaaaaaagagaatttaaaaagaaaaaaaagcgtacaattcagtagctttactatattcacgtgtatgtgcagccatcaccacagtcaattttaggaacattttcattactccacaataaaactctgtaccctttaactaacaccctccatcttttcatcctcctatccacagccctaggcaaccactaaaatactgtctctggagattttcctattctggacttttatgtgcatagaataatatgtggacttttttgtctggctatcattgaacataatattctcaaggttcattcatgttgtggcatgtatcagtactccattccttttcattccattgtatggatataccacattgtgtgcatttatcaactgacaaacacttgggctgtttccattttggctattatgaataatgctgctatgaacacttgagtacaagttcttgtggatgtgagttttcatttcttttgggtacatacctagtagtagaattgctgagtcatagggtaagtccaccttgaatagtttgaagaactgccagactgttttccaaagtggctatagcgctttacgtcaccaccagcagtccatgaaacttccaattcgttcgcatcctcgtcagcactttttattatctgactttgtgattctagctatcttcatgggtgtgaagtggtatctcattgtggttttgatttagtagactgaatgcatttctttttttttttttttttttttttttttttgagacagagtcttgctgtgtcatccaggctggagtgcagtggcatgatctcagctcgctgcagcctctgccttccaggttcaagtgattctcgtgcctcagcctcccaagtagctgggattacaggcaccttccaccacgcctggctaatttttgtatttttagtagagacgggctttcaccatgttggccaggctagtctcgaactcttgacctcaggtgatctgccagcctcagcctcccaaagtgctggaattacaggcataagccattgagcccagccctaaacttactttaattcagcatgtatggaaccttagctgtaatctgatagtctccagtgtggaagaccctaatgcagtggctgggcatggtgcctgtcatcccagcacttagggatgtggaggcaggaggaatgccttgaggccaggagtttgagaccagcttgcacaacatggcaaagaccccatctctacaaaaaatttttaaaattagccaggcatggggatacgtctctgtagtaccagctactcaagaggctaaggcaggaggatcccttaagctgaggagttcgaggctgcagtgagctgtaatagtgccactgtactccagccgaggcaacagagagagactctatttcaaaacaggaacaaaagcaaacaaaggatcctaatgcaggataaaggttaagaaaacatggcctttgagccgggcacagtggctcacgcctgtaatcccagcgctttggggaggctgaggcaggtggatcacttgaggtcaggagtttgagactagcctggccaacatggtgaaaccctgtctctactaaaaataccaaaattagccgggcctggtggcgcacgcctggagtcccagctactcaggaggctggggcaggagaagcactcaaacccgggaggtggagcttggagtgagctgagattgcgccattgcacttcagcctgggcgacagagcgagaatcagtctcaaaaccaaaaaaaagaaaacgtggcctttgtatcgtgaaagttagggagaagtttcttacttagctgtcagttagtttaactaaaaatataacattttgcttaccttttaggtttattaattttgtgaaaaactacaagaatcccaatctgaccatttccttcactgctgaacgaagtattgaagatgaactaaatcgtgaaagtgacagtgatgtcttcaccgttgtaattagctatgccatcatgtttctatatatttccctagccttggggcacatgaaaagctgtcgcaggcttctggtaagccgggggggggtggtgtatgttctagaggttaacagcagtgcacagtgtaacgtcatatttttgcctctttattcttattccattatgtttaaaactgccataaattcccccatgttttaattgtatgtaacgtttctgttgcctacatctattttcttcattccaactttttggtttatcttaaagtttatttcacataatccagttttttcttatttgtccagtccatcacctaagaatgcaaactcataacatgtgttgcccgagcagacctagaaatgtttacaagtcctctctgaaacacagaattgtacattcaactctaggtttaatacagccctgtaaagtaaaaaggaggaccttttagtaacaagtgggacagacaaccctgtaactaattggtgattgtgtctgtcgcctctctcaggtggattcgaaggtctcactaggcatcgcgggcatcttgatcgtgctgagctcggtggcttgctccttgggtgtcttcagctacattgggttgcccttgaccctcattgtgattgaagtcatcccgttcctggtgctggctgttggagtggacaacatcttcattctggtgcaggcctaccaggtatacttccatattctcacagggctcagcatctgttcaagtttcagggactgtgaatggctcctgggctccgcattcgtgagtgtgacctgtgagggtgttttgtttcctttccctgtgtggctcatcggtcgtcttgacttgctgtggacatcttaggaccaagaatttcacccctctttttggttgttgaaatagtagatataaagtaagaattgtgttttaaattgtatctttaaatagtgtcttttaatagtatcttttcattttaaatagtatcatgtgtacaagaagggctaacacacttttggaaaagattttgggtacgactgctgttaaaatgatgttcagcatagtatagaatgttagattcattttgcccaaaggtgccactaaaaaggcaaaaggtcaacacgtgtcccgctgctgtagaaggtggtctcagtcgtcctgtagacccgacgtgggcggagactcagtgcacgtgagagtgatgttcactggtccagtcccctgccgcctgtgttccgagtgttttcctgataatgtggctggctcagctttccctttagtttctcacttggtacctagctctgtagtgcagaaatactctgagaacattggagtcccccaccgaagtttatatgcttagaagacactgctaatcgtctactaatcatttatttttacccttgagttaacacaaggcagcaagaaatggcgttgttattgagaaattttaatgtcgcataattttttttttttttttttaagagagatgaacgtcttcaaggggaaaccctggatcagcagctgggcagggtcctaggagaagtggctcccagtatgttcctgtcatccttttctgagactgtagcatttttcttaggtaattatgctttcaatcctaccagtcctgtagtctgctgagcctggagaaagaaggagctggctacctgaacatgtccctttgtgttgcttcctttttttttttttcttttttttttttttctctgagacggagtctcactctgccacccaggctggagtgcagtggtgcaatctcggctcactgcagcctccgcctcccgggttcaagcgattttcctgcctcagcctcccaaatagctgggattaaaggcacgtaccaccatgcccagttaattttttgcatttttaatagagatggggtttcaccatgttggccaggctggtctcgaactcctgacctcaggtgatgtacctgcctcggcctcccaaagtgctgagattacaggcgtgagcccccgtgcccagcccgtgttgtctcctttttttaagctttgttctgcactgggaaagtatcactggaccacagaaaaattggcagcagtaacttaggtgtgattttgcaagtggcttccttctcatttaactgtcaggacagcattgatgttggggttcagggtgaaagagacctagagttcgtcttgccactttccccttttagtagccactgggaatgttgatagttgaaaatggcatccttgagtagccactgaatccttctccacatgacactctaagcagcagctcccaaatccacaggcactcgcttacaagatgtttgccgttgttttcaaaggcagtctttctcttctgtgcacacaactcattggggaagcagccttgttaatgaccagaagctcttgactcaccacattacaaggagccagaataagctggaacaaagtcagcacttctgtgtttctttcacatagagaatcatcaaatagacccactagtggggctgtctgccccatgtctgaagtgtagtaagagcaaagtgactctgtccactataggggaggctggactggaatcactcagtccaaagaagaccatccacgggccacaaactgcaatgcctacatggctgggaggtcagcttaatcagggccattgtaaggtcattgtaggtggtagtctttcaccacagatacactgctagcttgttattcttcatctccacaaagccatgtgcttttgaaacctgtagccctgtagttccttttgacaaacacaggtgcagaaaaaaaaaaaaaaaagaaaaaactttctttttttcactactattataagaaaaccagtgcaagtgtgatgataatagcagcagagactgtgcctcaaggttggagtgaccttgggacagtaggagtgagtagggattgtggcaccccaactgcacgtgtcctatctaaaaagacagttatgtgtgtggccaacccagtgctacaaggtctgtgttgttgttgttgtttttcttccaagcaaagctgtgaatctagatttttgtgtaaaatgccattgttaaatattggcaacttataaaaaaaagttttttaatcttaagatgggttgatacagtgtgggctaaacaggaaccatctgattcatgggctgccagtttgcagtttccaagtcttaccctcatgcctttgatcctcactcgattgtagattacctcttaactaaactgggaggctagtagtgttgatgtaataaatggaaaatactgtccatttcttacagtgaagcacagaaagtactataagaaatggcctgtattagtggttctcaaattttaatgtgtgtgaatttgctgtgaacctgagtatagtagaattggggttgaattcctgtcataactaggatggggcttcccaaatggtctggtgctgagtgtgctttgaaaagcactggcttatcacctcctgtcccacttctggtgtaatgtccagccgcagcatgccttctcatgcgtttggcctgtgctggctccttgtatctgtacatgcacatgaacataagacctgcagagagcccccggctgtaaacagaagtgacgcagagcccttctctccccgacaggagcattgtccgtgatgccagccgtgcacaccttctctctctttgcgggattggcagtcttcattgactttcttctgcagattacctgtttcgtgagtctcttggggttagacattaaacgtcaagaggtaagttggtgccaggattatagtctatttaatttgagtctagaatctagaggaagcagctagcgggtataacctttgtttccctctgtcccctcagaaaaatcggctagacatcttttgctgtgtcagaggtgctgaagatggaacaagcgtccaggcctcagagagctgtttgtttcgcttcttcaaaaactcctattctccacttctgctaaaggactggatgagaccaattgtggtatgcgcttatctgtggtttttctctttcctctcactgaaacagattatcacatgccttctaagaagccagacagcctgggaaggagattcttaaagctgttaaaatgtatctaaaaaaaaagcaaaagcaaatgtggaacagtagataaaatgtttttcctgtgagcttttatcagtccatataaacaagagttttaagttttttattttgaaatagtttcagattcacagaaagttgcaaagaaacttttatttttcctcttaataatgaggaaatagaagccaagagaggtgaagtggtttgccccaagtcactcagcccgtaagtggcagagtcaggatttgcacccaggaatttggactcctggtgctgtggtctcacccactgccctgtactccctattagcctgtcatttaagcttttccattttaaaaaatcctgctttttgtgtgtgcttaagattttatttctggtcgtaagcttatttactaagcagtctctgtcttatgattcatttgttgttccagatagcaatatttgtgggtgttctgtcattcagcatcgcagtcctgaacaaagtagatattggattggatcagtctctttcgatgccagatgtaagatgacttccttttttttttttttttaacttctttagctgatgatgaatacatttttcaaaacatgcacgtaggtgtttcaagcaagtgcctgcttctaactgcaaatggtgacagggtttccagggttaggagaactgtcgcagtgcactgctggtgtgggctgtctggcattctgactgagcccctctgggcacagctgcagaacacgaataactagtcttatgaggttactttatgagatgctctcctgattgtggggctagcaggaggagcaccctggggccctggggggaagactggtggtgttaggaatcatgagtccagctggaggcatctcagccaggaacctcctggcaccctcttattctccatgatcctcgccttgcttagttactatcagagtgttcacactctctcctattcttttatctttctttcaggactcctacatggtggattatttcaaatccatcagtcagtacctgcatgcgggtccgcctgtgtactttgtcctggaggaagggcacgactacacttcttccaaggggcagaacatggtgtgcggcggcatgggctgcaacaatgattccctggtgcagcagatatttaacgcggcgcagctggacaactagtcagtaccaccttgtcttgtacttcagaagcagcggaggaggctctcagccaggcagtcagctcaggcctgaaatgtctcactgaaaatagactttcttggaaaagttgtttttatgcaaaatgtatgttaaatctggctttaccttaaaaaacctttgaaaggactaatttaccacctaatactttgaaggcttttttcattaagtgctcatgtagtttttcttttgactgttagcagtataaaacgtagaaaaggaagttaggttttaagaaaaagtactgaaactaaagacttcctccctgtggagcaggtcagtaaccctgtctgtcctctctagtacccgaataggcttcgccccctcgtcctggatcgacgattatttcgactgggtgaagccacagtcgtcttgctgtcgagtggacaatatcactgaccagttctgcaatgcttcaggtaccttctcctttaccaaatctttcctgttttgctgaaaaattttcaaattatcatttaaaaatcatttgcatcgtgcctcagtttatacctatttgtatatcaaagctgggtctccctgtgtcatcattcctttcctcagtcattcattctgaaattgtcatgttgttcctggctcagacagccaccctcggggctgcaagctgaacaaggtccacatgttcggagtgtggtttccacataaggtttctcatcctgttctaactccagcgattgcctctcaggattggtatctggccttagcttctcagaggagggcttttctttatcactttaccctgtggttttgtaggagcgtcgaggttgccctggaattttcttaataaaaacatagaagccccgggctctgaccagtcaaggccatacttgaaggaggagatctacttcagggcagaaaatgatgcatagtatgcctaagatgaaaatggtatttcagattcattaaactgtgaaagtgacatgtggctgaagcttttagataaggggaaagattatccctcactagtaaggaaagtaatcgatagagaagaaagtaatgcccctcactgtcagtattttaaaatgttttacaaaaaatctggagacctattcttctaacagtcctccctgcatgtctccgccagtggttgaccctgcctgcgttcgctgcaggcctctgactccggaaggcaaacagaggcctcaggggggagacttcatgagattcctgcccatgttcctttcggataaccctaaccccaagtgtggcaaagggtaagtgctgctgccattgcagataagcatccactgcaactttaatttgcagtagaaaactaggagaggactgggctaagacagttgcatgggaacgtctcttctccgccccaccctgtcctggtcctttggtggaagcaggaaaaccgaaaacacctttttaagaaaatgcctcatagtgttcaactgattctgtcttagcgtgggcattcacatctcatgctctctctgtgtcctggccccctgggcatgagaatgaacgcagattcctgtgcacattccaagcggggctgagggagaggacggcctgctggtaatccaggcctgaaggaacttggcctgttcacttgtactgatggcagctggggcgtgatcttagctttagtaacattatcccacattaaggttgcgattcttttagcctcgtcatgctccttgccagcccatccatgtatagggttatgggctatctcactcccccatccagccaggcagccagttacccacggaagccagatatatggcccaaaaatagtgatgatgaccggaagtctctggccttgatttggaagctttgggaggtggaagatgagtatccccatgtatgttaggtaaaccctgaacttaggtttttcataagaacatacatctgaccagagtcatatcagtgaatcatttatatcatgcatgtgctttgagacctattcgaggtatcatgggatgactcctcctaaaagttaagtagaaatgaatcttgcagcttgatttactcactgactggatgctttggcctacgtaaaataagttgaagtagattcagtttttctgaaggcagtagccaccgttcctggggagcctccagggtgccagcgtcatgccaggcactccctgacattattccatttctcatcacgcagcctatgagtaggtggtggtatacccatttacagaagaggagactggggctcagaggtggtcattttgctcggggttacatgaccagtaagtggcagggctgaggttgttcccagggcccttgccctttcctgcttcctattacacaacaggactgagtaaaccctgtacctttgattatacatgaaaccaggtggagaaacagcagctatgtaccaaagaacccagagcaatcgagaaaagcccatctggccaggcgaagtggctcacacctgtaatcccagtacttttggaggccgaggtgggcggatcacctgagatcacctcaggagttcaagactagccaggccaacatggcaaaaccctgtctctactaaaaaaatacaaaagttagttgagcgtggtggcaggtgcctgtaatcccagctattcgggaggctgaggcagggagaattgcttgaacccgggaggtggaggttgcagtgagccgagatcacgccactgcactccagcctgggctacagagcaagactctgtctcaaaataaaaaaaaaaagaagccagtctgggagagaacaagctaaacctttggtgttcccttatctgggggccttcttcatccctgaaatgtacagctgggtctgacctctgagtccagggtcaggtgattttgcttagcctcaagtgctcagattctgctgatattttgcaagacctggactctcttgacacccaggattctttcctcaggggacatgctgcctatagttctgcagttaacatcctccttggccatggcaccagggtcggagccacgtacttcatgacctaccacaccgtgctgcagacctctgctgactttattgacgctctgaagaaagcccgacttatagccagtaatgtcaccgaaaccatgggcattaacggcagtgcctaccgagtatttccttacaggtaaagcctgccctttttcaatggggtttacccagcaaagggcctacactgggtgggagtggggagggttcccttggcaagatgctgattttcaggttgggttctggcccctgctccattctgagcacagggcagtatatcaaaggaaatgggtgctgggcaaaggagttcagaatctaaagtctctgtgaaggcctgagggctagagacgcaaaacttgatctctgcgccactgcacagctgcaagagacacacactggaaaatggcttaaggcagggggcgcttggagagcaggcggctcagagcagggcccggcccacattcttggccaacaatgaaccagaatccctaactgctggttatttgggatgctgcctgtatgtagactttttatattgttaggggttttttttcccaggaagaaaagtattatgtatgaactactgaatttagaaactgtagaaaggtaggagaaacaagtgatttatttttcctgcctccccatgatctcgcttaaagcaggaaggcctggatttgtttggaagaagttaagagccggttagctctggcagaaaataaatgaaagcatgttttcctcaggccttgcacggaccccgctgagcctgaggtagtgtctcaggatagatcaggattctttgtttttttgtgttttttcagaatgctgtggaatgctctctgtaaatgtctataaaatagcatagattgggcttataaacagaaactttatcaaaaatatacattttgcatcactgctgggcccttctctgggtggtcagtggccatgagaggtcaagtgagttgctttcggtgagtcttgtagacagccagcaaggttttctgcaagggatgtttcccaaaggagtctgaccacttggcagtggtgacaggatgaacacgcagtgttcgggagtgagagcgagctttaatgaggcctcccctctcccctccagtgtgttttatgtcttctacgaacagtacctgaccatcattgacgacactatcttcaacctcggtgtgtccctgggcgcgatatttctggtgaccatggtcctcctgggctgtgagctctggtctgcagtcatcatgtgtgccaccatcgccatggtcttggtcaacatgtttggagttatgtggctctggggcatcagtctgaacgctgtatccttggtcaacctggtgatggtgagtcctcatacagtctcagtttgtccctagctcctgtttcacttgggggaattggctgtcttagattccatgtaaaccctaaagatggagtaagataccaagtctggcgcttgctcttggcacacatggagaggcaggatgagtgctggaggagtgctggatggtggtgggacagggcatagagggagcgagcattgagttggacatctgggagcataggcacattacaggcaatttctgttcaattttttctcttgtcccattccttgcggctatactagtatacctgatggtgcctctgaccatggaaatgtgatttcctggcctagttctgggctagtctgcctgtaatttgttattctttagagattgcacaagcctgtagcctgatgacagcaggatgttcactttttacttagaaaattgcaccccgccccaggagctctccgaccagtgccttttgcctcctatgtggttatcaggtacttttaatcattaaagatgagagcacttgagaaggtattcatggaaaatagaacagtgtatccgtactctcagatatgagccctgcttcagataggggagcactgaggtccaagaaaagaagttgtgacaatgcgccagctcggtgcgggtggggtgaccttaacgggttccagcaatttctcctggtcaacacaaacgtgccacagaaaaccaggcttttggctgtgtgtagagagggccccaaaaagttcctggtacagtaagattggtgtgatggaggccttgtaagtccaatgggatgcttggcctcctctagcacccagggtgccctgggtaattagcacccatcctcagaacggggtggctgcctagggtcttcaacaggaagagagccatcctaaaggaagtgctttatttcagagctgtggcatctccgtggagttctgcagccacataaccagagcgttcacggtgagcatgaaaggcagccgcgtggagcgcgcggaagaggcacttgcccacatgggcagctccgtgagtaccctgagcagggccacgccggcagagtcgcaccacaaagtaatcctcctcagtgactgaagagtctggatcctgtacttacaaagcagcttctaaggattgcaagctttcaggcaattcatgaattagctgccacatcgtggacagaacggacgttctgtggaactgtacctgttggtacggctcctttttaggtggcagtgtgctgaagcaggaaaataacagacaagttaaacatgagacagctggcagtctttcccatttaaaatgcaggggagcccgggccagaacccagcgtgtgatgtgcggttggtgcctggagagtcgtcttggttcaactctacaccctggcttagcctatctctttaccactgtagaaaatacctggtaaagagtaaaaactaaaactttgtttcgtaacacttttaaatatttaagttttcacctgagaatataaagaaagataatcaattgggagacacgatgcagtgtctgtgcagaatacacagcttttaacttggtcatacctctcccccaggatcataaggcagcaaatagtgttaggtagtagatgatgctacctgggttcagttcccattgctttgaaccttgaatattaagaaatccccataagggctggccacggtggctcatgcctataaccccagcactttgggaggccaaggctggcggaccacttgcggccaggggttcgagaccatggccaacatggtgaaaccccatctctactaaaaacacaaaaattagccaggcatggtggcgtgcacctgtttaatcccagctactcaggaggctggggcaggagaatcacttgaacctgggagaaatccttgtaaggaagtgtttttgttcaattacaggttggtaaaagtggtttctaacacagtatctcttcttttaggtgttcagtggaatcacacttacaaaatttggagggattgtggtgttggcttttgccaaatctcaaattttccagatattctacttcaggatgtatttggccatggtcttactgggagccactcacggattaatatttctccctgtcttactcagttacataggtaagagttctcatcttaaaagggtggcacaatagaaggacattactgaaagggaattctatcctgaggcattcttttcaagtatttgaactcatactaatggtcatttgataatgataaatgatactgagtaaaaaaatttcttctaaaagaaaaaacccatccaggggattcatgatggtgcagactactttattaggaagttgtcgatgttttttctggaggcctgatctgtctgcttcacaaaggcctggagccagtccttgaatggatctgagtgtcagcaggcagggcagctcctccctgccactgagatgaaggagtccatctggcagccagctctcacaccagcagtgctgcagaacagctttttatgtccctcatggatttcccgtttcttagcaaagtgcttgctgcctttcttcatctcgagactgtccttgatccttttacttctatggccacttcaccttgcacaaaaatgacccacggttgaaagaacaatactgatttgcttcatttatagctttgtcactaaattgaagcactgaagtagaagattaagaaaatgaggggctttttatcatctccgggggatagaaagtagttctattacaatctaatatactagttccttttaagaaaaaaaaaaaaaaaaagagatgagcactttggaaggctgagacaggagaatcgtttgagaccagcctaggcaacatagtgaggcctccatctctacaaaaataaaattagccaggtgaagtggtgtgcgtctgcagtcccacctacttgttaggctgaggcaggaagcttgcttgagcccagaagggtgggcttaggatgcagtgagtcgtgttcataccactgcactgcagcctgaggaagaaagcaaagagcccatctccaaaagagagggagagagatgtggtctcactctgttgtccaggctggtctcaagcaattctcctgcctcagtcttccaaagtgggattacaggcgtgagccactatgcccagccaactagctccctttctcctgcagaaataagaaaaagtctctctctctcatagggccatcagtaaataaagccaaaagttgtgccactgaagagcgatacaaaggaacagagcgcgaacggcttctaaatttctagccctctcgcagggcatcctgactgaactgtgtctaagggtcggtcggtttaccactggacgggtgctgcatcggcaaggccaagttgaacaccggatggtgccaaccatcggttgtttggcagcagctttgaacgtagcgcctgtgaactcaggaatgcacagttgacttgggaagcagtattactagatctggaggcaaccacaggacactaaacttctcccagcctcttcaggaaagaaacctcattctttggcaagcaggaggtgacactagatggctgtgaatgtgatccgctcactgacactctgtaaaggccaatcaatgcactgtctgtctctccttttaggagtaagccatcccacaagttctataccatatttttagtgacagttgaggttgtagatacactttataacattttatagtttaaagagctttattaatgcaataaattaactttgtacacatttttatataaaaaaacagcaagtgatttcagaatgttgtaggcctcattagagcttggtctccaaaaatctgtttgaaaaaagcaacatgttcttcacagtgttcccctagaaaggaagagatttaattgccagttagatgtggcatgaaatgagggacaaagaaagcatctcgtaggtgtgtctactgggttttaacttatttttctttaataaaatacattgttttcctaagttttggggttaccctatctgctttgagagacaaatacaaaagctaaatggaagagattctatctaacctgtccttatggtaactaaatgccgtcttacattgagctagaaatagacctagaagtttcattagacagccctgatccttccctatcctaaagatgatgtcttaggttgtataactatttggagatgagaatgatcaaccagggccaggtgcggtggctcaaacctgtaatcccagcactttgggaggctgaggcaggcggatcatgaggtcaggagtttgagaccagcctggacaatatagtaaaaccccatctctactaaaaatacaaaaatcagccgggtgtggtggcacgcacctgtagtcccaactactcaggaggctgaggcagaagaatcgcttgaacccagcggaggttgcagtgaaccgagatcacaccactgcactccagcctgggcaacggagcgagactctgtctcaaaaaaaaaatgagaatgatcaaccaatgtatacttcataaaactgaaaccttaataagccccagaccctttaaaacccttagccaccatttgccgtcttattcctggctttaagagatattccaagatctgctataagagatgggctgtgcctgatctgggtcctaaatgtgtcttgactcaaaacacacctcctcggtgagttccagagcataattcagattctgtcagtatactgaattcactctactacaaataatgggccaagggctaggtgggctgttatcaaattgtgttgtttacaaaaatgctaacccagggtcctcgcccaccagctgccagtgccctctgctactctttgaggctatggttaccccaagtcttttcattgcattctcacctggtgtgaaattggggctccctcgcaaacgctggtttcgctgttcaaaaaagcggaatattgtatagaaaagcatgttgtcttcagtctgctttgcagcatctaaaaattttcgtgcagaaatgttgtcatggccaccaatgccccggataaaccttaaggcagctaacacttggtgtttggaaaggagaacttctactatttcatcatttgctgttgaaagtcgctagcagtaagggagagaagtccaggtcagtgcaaacaacaggaacagagttagtttccatagtctaaaacctcacacatcagagttaccttcagcatgtccagagatagctgatgagcaggaggatagaaactctctagggataacagcagacaagcctgaaagacatttttagacccacttcagttggaaagataacggttaaaattttccatttttaaccacaatggaagtaaaaatctggcaatgcataccaaaggtttggagtcgctgaggacgtggtactgcaggaactgatgcagcatataaaagaggttgtgctggacaagggttttgataacaagttcatgtaggtaatgctgaggacaaaagtaaaaagtgaaagaacacttccaaatcattcagctacaacagactagaggctccccaaggactggctattctaaccaacacagtaaaagtctgtcattacaagaagtggtttcgtcatgcaggtaaagaccccaacttgaccttacacttcccattccaactaataatgtcaggagtcactcagcattctgagtcagggaggcagacctgtcttagcatatgagtcatcttctaagacagtgactgtgttttttttttaaattccttctgttttaacttgggcccagatgatttgaaggtacctgtactgcaatctgaaactggttaagagaacgaatgtattccatcagcacggctatcacaaatttatgaggcatctcctagggagaaaaaaatgtggtcttacaaataccaacgaggtgcaaaagaggctgcatataactctctatccaacccccaccttgtttccatcttaaaatggcccagtgttcatctttcactggttttgcacacatcgctccagaaccacccgtcaacaattatgctttaggcctcagcattagaagccaaactaccagctctagggcctcacccaaggaaactccagtgattctaatcacttcaagtgactctaatcacatgaagtctcctcgttttcagcaacttccttgttttgagcattctcagtccagaagaggcggaaagctgcagcccaccttcttttccacaaaggctgacaggacatgggtgtacacatctgactggtccagcaccgcctgggtccgcaccggcctcttgaggagcgggctgcttcggctctgccctgcttccaccgcctgaaagaaaaaaaccacaaactatgatcttcggcatcttagaggaagggtgctgtttacagttcatccacaaggactgaattcttcgatgtggacccaggatatgagcggaaaacactttctctacttagatacaactttttcctgtgcgcatgcctgtaatcccagctactcaggaggctgaggcaggagaatcccttgaacccaggaggcagaggttgcggtgagccaagatctcaccattgcactccagcctgggcaataagaacaaaactccgtctcaaaaaaaaaaaagcagttcagatccgtgcagattatgcaatagctgtggggtgtagcctgagaacttgcatttccaagaaactccagatgctgctcatgtggctggtcagtggcccacactgctgagtcatgacggtttatggagcccagcagaccgtgtgggacggcacagaaactgccatttgggatcagacctactgattcccacagcccagaacacccacagcaatagagtccaaaaggactcagccatccctcacgtctggcagcgtaggaatggacactgtcccagcaactggccctcttcagtgcctgtctcagacctcttacccttccatgaacagctaaaggggagtggagttctggggcttttgttggtttaaaaccattttcagcctaggactaatcagatcctggaattgaaataattcattctccttgtcctaaacttttcttctggcttcagaagatatgatgtacaagtaatacagcgggaattggtggcgataagccatggttattaccttgactacaaacacgcctgctaagtgctaacactgaatcgtcactatctcaacaggattctttcccaaaagggaagaaaggtgtggcaaatataaatatttctaatttaattttctaagtcctcactctggcataacagaaaaatatacaaaatattgcaaagcagagactgatttttctcatctataacagtagaccaaggatctacaggcaagatcaaacacagatgggaaaaacaaaaacagtgaaggtatgaagtgagatgcagccgccagctcgtgggatgcagggaccctgaatttactactcctccactatcccccactactgccaccttgccctatggcaggcggcaaatctcagcgaccttattctaatatataggaaacaattttgcatcataattacttagaaaatacccgggagggggtgggggaggaggaccctttgtcatactccatgtaactcaccatcgcataactctgctcggcatccaggtactttttatactcatggttgagtttatcaaaaacagtggctatcacgggcagcgatgctctgtctgactcacttaacactggaaaggcacaatgttcacacacggatcaaaccaacttcatgtcagcttcagaatttccacacgttgctatgataaaaactaatctcaaaaggttaccaatgcaaaagtacctttaaaggacactctactttaaagacctgacagctagatgtcattcgcaacccctttctggttacggttaaaaaaaaaaaaaaaaaaaaaagctatagcaggccaggctcagtggcacatgcctataatcccagcactttgggtaggccgaggcagaaggatcacttaacgctgggagtttgagaccagcctgggcaacaaggcaagaccccatctataccaaaacaaaaacaaacaccaacagcacatattggtaggggattattattattatttttttttggatacagggtcttgctctgtcgcccaggctggaggtacactgacacaaacggctcgctgcagcctcgtcctcccgggctcaaggaatcctccctcggcagcctctggagtagctggggccacaggtgtataccaccaaactcagctaattttttttttttttttttttttttttgtagagacagggttttgccatgttgtcgtccaggctggtctcgaactcctaggctcaggcaatcctcctgcttcagcctcccagagtgctgggattataagcatgagccaccatgcctggcctcagtaggggattcttaaagaagacacatatgcagtgagtggcttggattttgaaagaggtgtgtgtgaaggccaggggtggtggcccactcccctcctgtgtgcccactttcattcagaaccatcccatttattgttcttttctaccagtatctctacaaatcatctttccatttagcagcctttcctagggggtcacatagccacccctcacataaagaatgaggctgtgggtcacagacaagacacaacaatgtagcccacatcccgataaaaagtgttgggcagcacaggcctcacactggaatcagagcaagggggaaggattcaacttactctgtgaacagacagacaggatgaccatcttgcattcctttctctggaggagaaagtccatgagtcttcctttgtctggtaagagatttactatgggctcaagtttcacttggaggttccagaggtaacctggattttaagaggcagcaaataaaacagtatgatgcaaaccgtaacaaaagcccaaaagtggttcccctaaacatctgcggggcgggtggcaggtggtgataaaaagccgcaaagtacagtcagtgtagcttttccttcctaaccaaagcagagctgagccattcaggagcaattcaggagcgtgtctaccacaggaggatgacagcccaaccaccgcacacctggctgactcttttccaagtaacctctgcattcaggggcacatcaaaggtgtagctcctagtccttcattccaaacggggacttccctagacctagcccctcttttaacgtttaaaatagaaaaagatgtcaacacgtggcatcaacttcagtcctgtgctttggtttctcctacaacagctcattagtttaaaaggtaactccagaggctctcaatggaacatcataactcatccattcatcgacccataaatgtactgatcacccacactgccagcatctggtgtggcctttcccaattgggatgccacaggagaatgaagtgccacataaaaaatcatctgggtgacccccttttcagttggcccaaggcaggtacagagcagctgtacaggaaaacaccagcgagatgcacaggagagaaatgacttcattacatacatacagtggatgtcacatgaggctatgggttacagacaaggcacaacaatgcattacatacagtggatgcctacagcatcagggctaattctctcctcaagagttcttaggaattccagaggaaaggcaggaaaatacacagaggattaaagagtaacataggagattctctaataaccagcctggcgaggtattagagacacaggggcaacatggcaagaccctgtctctacaaaaaaaaaattataggccggctgtggtggctcacacctgtaatcccagcactttgggaggctgaggtgggcagatcacgaggtcaggagatcgagaccatcctggccaacatggtgaaaccccgtatctactaaaaatacaaaaattagctgggtgtggtggcgcatgcctgtaatcccagctactggggaggctgaggcaggagaatcgcttaaacccaggagttggaggttgcagtgagccgagatggcaccactgcactccagcctggtgacaaagcgagattccgtctcaaaataattattattattattataataaattaactgggcgtggtgatgtgcgcctgtaggcccagctacttgggaggctgaagcaggaggatcgcctgagcccaggagctcaaggctgcagtaagctgagatagcactactgcactccaggctgggtgacggagcaagaccctgccttaaaaaaataagatttctttaggccgggcacagtggctcatgcctgtaatcccagcactttgggaggccgaggcaggcggatcacctgaggttgggagtttgagaccagcctgaccaacatggaaaaacctcgtctctactaaaaatacaaaattagctgggcgtggtggcacatgcctgtaatcccagctattcaggaggctgaggcaggagaatcgcttgaacccgggaggcggaggttgcagtgagccaagatcacgccattgcactccagcctgggcaacgagcaaaactccgtctcaaaaaaaaaaaaaaaaaaaaaaaagatttctctaataaagagattacccaggaagagacaattaacagactgaggaggcttcctcagcaaggccagaaagaggagcacacctcccgggctcatgcagaacagaaaagggcacggacaccggtgggaaggtcgatgggagaaatgagggagacaccctggggtggagtccggctttccatccaccctggggtggagtctggcttttccagaatgggcttaagcaggagaatggcattcttagttgttgctttaattattaaaagtagtatatgttcttgataaaatgcacatatagtaaaaaacgtataaagtgaaaaaaaaaaatcccattcccacgcttgaaaggaggggtcatttctaagagattcaccttgaaaacgtccctggctacaactgggatccaaagtcaacaagcaccatgttgtaacacgacaactgtccccgctgacctaccttggcttgcgctgataatgatgtcaggttgaaagacaatccaagatgaagaatccacatgttataggaaattctaaaccaggaaaagatgaaaacaaaaagcaaacccagtttccgctagcactcgcccctgcccaccatgtactgagtccacgctaaacgcgaggcccctggacagtcagggaagctgcctgcggggtggctctcggagtgttattcacagctgcccggaggaggacttcaggaccactctctgagggtgaccacttgccctgttgtgcacggtgccacaccttagtaaaggatacagagtttacatggaacaggagactggctggtcacggcagcaggacctacaaattgagaaaacataagtgcaacgatgcagtcagaaaatgctgcaaatgctggtacttatgacacaaaagtcaatactttttaatgtcattacgaaatgtttattcaattgtagtcaaggaagaaatgaactgttccgtctcactgaaagcacgtacggggaggaagggggaaggagctaacaatccaggaaaatctcaccaagaaaaagaaagcatgtcaaggcttcaatcactgtggtttgggttatttttaataaccaaagatgactcatgatcgtttacatatgcacgttaaggaactgagaaatttacttgaaggattcaaaatcaaatacccagatcatccacggagaatgtttcaaataaatgtggcttgtagcttaattatctttttttttctttaagagagggtgttgctctgctgtccaggcttgagtgcagtagttgatcatagcccactataaccacgaactccttggctcaagtggtcctcctgcctcagccttcagagtagctaggactacaggcatgtgaccatgccctaactttttttcttttttttttttttttttttttttttgtgaagacaaggtctatgttacctaggctggtctccaactcctgggcttaagtgatctgcccacctcagcctcccaacatgctgcgattacaggcatgagccactgtgcccagccacttaattatctaaataattagttcgattatccattgcatagagtaggtccaagcacagtgagctcgtctgggaagcagacccccaaaacctcacatgacagggaccgttaacaaccagttatactgctcatgagccatgcaggcagccctacaagctaaccatgactcctggttctgttccaattacccaggtacaatcagaaggcaggtttcaatcagctggtcagagaaagggtcattgtgaacagaccacccaaaggtaggaaagagcccaggcagacaagctttggcgaagagcactcgcgctttggacctaagtgtcaaggtctgcgccgagtgcacagccctcacctttgggtggctgacctacacactgtcaggtgagagctttcatttttaaggccccccagatgatcctaatatgtagtcagattgagacccactgttctaacaggcccaaaacaaaaagaaaaagggtggctgactcttcccaaaagtgctggttatatctttctcaacaggcccattcaattcctgagcacgcccacccagtggcagcacagtgggcaagacacacggatgcatcaagccgccagggctcacagcccagcaggaaacaaaaggagagtcactaacctctgaaaatgctttgcagcccacactacctagatccccagaccctcagtggattcctgatttcctcctattgatctctgcacgggctgttactgtgaccaggcctcgcatctgttcccttatgaccagatggttagaacctgatgcctcctaactggtcctgtaccaccggaacagagctgaaggttctaagccaggggtgtccaatgttttggcttccctgggccttaagaggaagaagaagaatggtcttgggccacacataaaatacactaacactaacaatagctgatgagcttaaaaaatatcattaaaaaaatctcataatgttttaagaaagtttaagaatttgtgttgggctgcattcaaagctgtcctgggccacatgtggcccacagaccgtgggttggacaggcttgttctaaatgtttagtttttttcccccaattcaccagcagttaccttcatgccaagtgggcagcagacacaagacaatcacttggcaaaatctattctttcaatactaacattatttacaaaggaaaaggaagaagcttgaaagaacacagaaagccaaaagacctaattgaacgtctgttaagaaccagctccttcctccaactgtgccagaaagtaactaagcttttggctggtccagcaagacagggcagtcaggctgacaatggtgctcttgctgaactttcagccagagtgcgattctgaactcccgggtgaacggtacaaggaaatcctgactgcaggctgggtcaacccgcccaatgccatcggacaaagaataaaacattactactagggttccaaatgtgagccatctgactacgtcttgcacactgaaacctcagactagccaattctgcactccaatctccttcaaaagagagccgggagagactgctgcgagggacaggcacagaagaaagaccctgtgagaacacagtgagaaggtggccatctgcaaagaggcctgccaggagggaggcctcagaagaaagcaaacctgcagacatcttgatcttgaacttctagcctccagaactgtgagaaaataaagttctgtttaaggaaaaaaaaaaaagagagagagtgtgtgttgaatattctttcagttctatcttaaaatcaattacactggaaaaaggcaaaacgaagcaaataaatgacttctttcccttttcctgaattcctgacctccactcttctgacttcccaaccccacctctccagacagaaggaggactgatttgggtaagcctaagagccacagccgaagcacttactgtgactgtcagtcccaaagaatgcaatattcatcatcactgtcacacggaatgtgagaaagagaaaagtgatcccaggttacagtaacaaacctacagccaaagttaatttcagcgttacagagctaaggcaaacagaaaacgttacgggtgtattcaatattaaaacatatttcaccatcaacggctaatcaaaactatccattctaaagctcagggaagataaattattctatttcctcccaagggagattcatctatcttagaaaatgcttttttcacaacataattttagcttataggatcagtagtagttgcattttttaaaaaactagaacaggctgggcatggtggctcacacttgtaatcctagcactttgggagagcgaggcaggcggatcacctgaggtcaggagttcaagaccagtctggccaacatggtgaaaccccatctctaccaaaaatataaaaatttgggccaggcgtggtggctcatgcctgtaatcccaccactttgagaggccaaggtgggcagatcacttgaggccagaagttcaagaccagcctggccaacatggtgaaaccccatctctactaaaaatacaaaaaaattagctgggcgtggtggtgcacgcctgtaatcccagctacttgggaggctgaggcaggagaatcacttgaaccttatctcctctcacaagtatttaagcgattgaatacttggttcaattgcttgaatacctcacaagcttgaaccttgtgacagacaggtggaggttgcagtgagccgagatcatgccactgcactccagcctgggcaacaaagtgaggctctgtcaaaaaaataaatttaaaaaaatataaaaattagctgggcacggtggcacacacctgtaatccccactacttgggaggctgaggcaggataatcacttgaacccaggaggtggagactgtagtgagccaagatcacgacactacctaccagcctgggtgactcagtgagactgtctcaaaacaacaacaaaactggaacaaatggcccctggcaaaatcagacagatctgggaatctctgtttattcctcactccacttttaacgtgactcccaaagatcatggtgagaacacagccacatggtgaaagggcagcacagactcctctacagaacccgtgttacctgtgatggggatctgatagggctggatcgatcgagcgggaagcacggggtggtggaaggtaacggagccgtcaaactctccccgtaacttgatatcgaatattaccgatgtctgggggggaaaaagacaagactgaggccaaaatcaatcatggtttgcccagttgctttcattccatcccatcttgctgtttaaatcagtttaaaagcctgtgtttgcatttcctccctacaggctagctcttacttgagaaggaatttgtcattaacatcacaactctcttttaatatttttatctcctctcacaagtatttcctgcatttatgacatgcttcctttgatgagctcactcaaagtgacctaagcagatctctgtcatttcaactggaaacatcctcacgtgtcacagagttagcgtcaccaccctctgggagggtagaggaggtaagcagcttctttatatcagaggcccagcccacaggacccattctagttgtcctggtccacacggcctcaaaaccattatcccccagcactgtcatccatgctcacaattgcaacagagagttcaagtactcgtggaatggagcggattcccaccttcttccaaggtcaaatctcaagcgttagtttctgaaatagttttgaattatctttaatcaactgacacaatcacttttttctaaactacttgagactaccaaacccatttccatctggaagaccaaaactcttagcataaaaatgcactttctagtcttattcagacattttgccaattttttttttttttcggagacaggatcttgctccatcacccaggctggagtgcagtggcgcgatctccactcactgaagccccgacctcctgggctcaagccatcctccagccttagccccacaagtagctgggactataggcgtgcactaccacgcccggctaatttttgtattttttatataggtggggttttgccatgctgctcaggctggtctcgaactcctgggctcaagcaatctgtccgccttggcctcccaaagtgctgggattacaggcgtgatccaccgtgcccagccaccaattttcacaaggcttttaagcaaccttaactttggtagaaacgcagacagcttgtacctctgtatcctgatgatgcacgactaccaggttgtccaccacgttcagggcaaactttcccgtcctatttaacttcaatatgtgcatctttttacaggcaccttctctgtaggatagaaagcaaaaaacagatcaacaagctgcagttcacattttaaaatcagagagagagggaaaacaaagcatgaaatctaccgtggtagatgatagaggaccacctccgctcctgtgctgttggaggtccgagaatgatgcctcaagaagagaacatacagctgcccgtatctaattagggaacaaacagacataaatcacatctggccattcaaaattcctttgttctaaatggcatcacggttaagtaaattataagatattcacttaatggagtattttgctgccaacaagtgtttacaaagaaacatgcagttactcaaagcctattataaagttaagtggaaaagagaacacacactaaacacagcttgatcataatattttaaaagaaaaccccaaacctaagcatagagtctaaaatgattggaaagaaacacatgtaatagttatacttgagtgatatgctaagttcattttcttctctgttttccaagttttgtataatgaatgtatattccttaataacaggaaaatataatcactatttttttttttcatttttcagagacagggtctccctctgtcacccaggctggaatgcagtggtgcaaccacagctcactgcaacctccacctcctaggctttggcgatcttccctcacctcagcctccccagtagctaggactacatgcacgtgccaccgtgcctggctaatttttaaatttttttgtagaaacagggtctcactatgttgcccgggctggtcttgaactcctggcctcaaggcgatccccctgccttggcctccccagtcactggtattacaggtgtgtgccaccatgctcagccttttctatttaagtgccatctaataaatgttgctgtgaacagttcctgaatgcatattctagtccagtggtaaactctgtgctgggcctgcccagggacaaggaggagaccaaggtgggagggaacaggtccccacctccacttcagccaggactgctctcactttatctattgtctaaacaggaatgctggctgggcacggcggctcatgcctataaacccagcactttgggaggatgaggcgggaggatcacccgagcccaggagttcaagaccagcctgggcaacatggtgaaactccatctcttcagaaaatacaaaaattatccagatgtggtggcatgcgcctgtagtcccagctacttgggagactgtggcaggaaaatcacttgaacctagaaggcggaggttgtggtgagctgagattgtaacactgcactccagcctgggcaacagagcgacactctccaaaaaaaatttaaaaataaacaggaatgccacagaagagtacgtttaaaaaaaaaggaagaagaaatgaaagaacattatactaactaccataaagtttgaaagtttgggccactgttttaggccacagaagaatcagaagtaacttagaagcaaaattttgactattgtcgaatcagatacaggcatacaggggttcttttttattagtctctattgtgtgtttaaaattttcattacaaatttaaaaactgagatatccactttttcaaatgaaaatatacctccgtactgccaggcgtggtggctcacgcctgtaatcccaacactttgggaggctgaggagggcagatcaagaggtcaagagaccgagaccaccctggccaacatggtgaaaccctgtctctactaaaaatacaaaaattagttgggcatggtggcacgcacctgtagtcccagctactcgggaggctgaggcaggagaatcgcttgaacctgggaggcggaggttgcagtgagccaagatcgtgccactgtactccagcctggcaacagagcaagactccatcacaaaaacaaacaaaaaaaaaaagtaaaagaaaatatacctctatatatacgtaatttagttccatgtctgttacataaaatcttaatctattttcttatttagaacaattattatttaactgagcttttaaaaaaaataaacttggccaggcacagtggctcatgcctgtaatcccagcactttgggaagccaaggcaggtggatcacttgaggtcaggagttcgagaccagcctggccaacatggtgaagccctgtctctaccaaaaatacaaagactagccgggcgaggtgacgcacacttgtaatcccagctacttgggaggctgaagcagaagaatcgtttgagcctgggaggtggaggctgcagtgagccgacactgcaccactgcactccagcctaggggacagaacaagactctgtctcgaaaaaaaaaaaaaaagaagaagaaattctaaaacaaagatactaagaaataaattggttcaatgttcttgttttatcaggctagaaaggtaaaggaattccttagcatcacaaagctgataaaaatcaaaaaggaatgccaaaaacactgcaggttttctatgttcacaggacctatacactgaatacccagaacaaggggagtcctccttatgtgttctaggggtcagggcatcacgtggtgcttgtaacacactccttctattatttatattactgaaagcaatcacaggatggaattctctctgacacggacatacatggtagccattgcgatgtctctttcggaaaggctgggtttagttgacttaggcgcagctggtaattcaatctcaaatttgggcagcttcgacatagtgccagcctgtttagggggaaaatgttttaggaaaagcttattaaaccccttcaatgtttcatcattccctgtgtaaaaccaacaaggataaacacagacttcgtctttggatcctttccaccgtcccccatgtcctctcacagcctgtctgcccagcatagaatgaatggctccaggagctgacgggtatacagagtgccctctagtggtcagagcggtgacgttacggctagaggaacctgtccctaacgtgcctgacacattaggatgctacaggaacaggggacaactggggaaaggtgtttttttcaggggaggcttcctcttaccctaaagtgaaaaggctgcaggacattctccaggaccgtggtagacagcaagatcacggcgctctcggggcagtacatgtaccaattcacattgagattgtggctcttcaagagtttcagactccgtttctctggtaatacctgaagcagagtttaagaaacaggatcttcatttaaaaaacggcaaactaatcccagcactttgggaggctaaggtgggcggatcacctgaggtcaggagttcgagaccagcctggacaaaatggtaaaaccccatctctactaaaaatacaaaaattagccaggcgtggtggcacatgcctgtaattccagctactcagaaggctgaggcacaagaattgcttgaatgaacccaggaggcagaggttgcagtgagtcaagattgcaccatcacactccagcgtgagtgacagagcgagattcagtctcaattaataaataaatcaataacagcaaactgtcagaagatccttacagtgcgctctgagaataaaaagcagaagaaacccactaagtgaaatgaacattctcacttgtacttattacagctactacttaaccagccctatgcttggtgctttacagagcctcctaactcatttactctttgccacgactgagaggcaggcatcactggccctattagccagatgagaaacaaggctccaagagtggattagggaacctgccccttaacaaagcaattatagcctgggtaggctgtttccctccaaaatccttatctgtgcctccacatgcctgggcatgtggagcacatggatacacctaagagcaatttacaacaaatttctcctcatccaggaaacggccaaaagaaactgacacctccaggaccccatgtgttaactcggccacctcccagaccatggcagatctgccttctgcttggcctccacctcgactccagtctacactgggcctgggaggagctcccttcttctagcagatgtgttcataagactccatacaaatgcagtactttataatccaggcacattttcaatgtaccctaaatattccgatattacagaacactgtacagagcccccaagacattaatgctcatggtacactgcactgaagaactgctgcgcaagtcaggggcaggagccgtaagcttcttaagaactataataattaggatgtgctagagtcttctttctttttaacttttttcttgaagatctgaagccatctaggtaaccttaaggtatactttcccactgcagagaacagaaagacagacttttaaatgattaccatagggaactcccccagaaagcaagccatccttcccatgcaatcacatgtacaaaattctatttctgtgtgtatggaatttgtctaaagtttgtttaaagttctcctattggtcattacaaattttttttttttttgagacggagtttcactcttgttgcccaggctggagtgcagtggcacaatctcggctcaccgcaacctccacctcccacgttcaagggattcttctgcctcagcctcccaagtaactgggattataggcgcccaccaccacacccagctaatttttgtatttttattttgagacagtagagacggcacttagtaaagatggagtttaatagagacggggtttcgccatggcggccaggctggtctcgaactcctgacctcagatgatcgcccacctcggcctcccaaagtgctaggattacaggcatgagccaccgtgcccagccagtcattactaagatttcgatgatggccttacagcaaagcaccatggcattaacacacaggtgtattttctctaaccatacattctaaattatatgactttcattaggtcaacaaaattaaaacctgaaagaactcttaacaccctctaaattagttccccttagagatctcagaagcatgcttaataggtcaggaagctggaacagatgaaaagaaacaggcaggtacatcaaaggacacaatccacagagtggaaaggcaacctccggattcggagaaaatacttgcaaattgtatctctaagaaggtgttaatatcagaatatataaagaactacaattcaacaaataatagtaatttgattttaaaaataggcacaatgacccgaattagtcatttctccaaagatgatacacaaagtggccaaaacacacacacaaaagtgctcaacatcactaatcaacaaagagcgcaaatcaaaaccacaattaagatggctagtatcaaaaacaaaacaaaacaaaacagcaagtgttggtgaggatatggagaaactgggacccttgtacacttggagggattgcaaaatggtgtaactgctatggaaaacagtatagcggttccctaaaatattcagaaacagaactaccatctgctccagcaatctcactctgggtataaatctaaaagaactgaaaacgggatcttgaagcggtatctgcatacctgtattgacagcagcactattcacaatggccaagaggcagaagcaacccaaatgtccctcaacagatgaatggataagcaaaatgtggtgtatacgctcagtgcggtattatcagtcttaaaaaggaaaccctatcacatgctatggcatgggggaacctgtaggaaattatggtagatgaaataagccagtcacaaagggacaaatactgtataatttcacttatatgaagtataaaaggtaatcaaattcggccggacacagtggctcacgcctgtaatcccagcactttgggaggctgaggtgagtggatcacctgaagtcaggagttcaagaccagcttggccaacatggtgaaatcccatctctaccaaaaatacaaaaattagccaggcgtggtggcgcacacctgtaatcccagctattcaggaagctgagacaggagaatcgcctgaacccaggagacagaggttgcagtgagctgagatcacgccactgcactccagcctgggcaacagagcaagactccatcttaaaaaaaaaggagtcaaattcatagaaacagaaagtaaaatagagattgctggggctgcagggaagggataaggggagttgtttactggatagttttggtttcacaagatgaaaaaagttctggagctatttcataacaatgtgaatgaatatacttaacactactgaactgaacacttaaaaacagttaagataataaatgttgtatgtttttttaccacagtaaaaaaaatatttttgaccacacacagtggctcatgcccataaatcccagcactctgggaggccaaggcagaagaatggcttgaacctaggagttcaagaccagtctaggcaacacagcaagacctcatctctacaaaaaaaaaaaaaggaaaaaaaaattaagttgggcgtgctggcacacacctgtagttccagctactcaggaagctgaggtgggaggactacgtgaggctaggaggtcgaggctgcagtgagccgtgattgtgccactgtactccagcctgggtgacagagatcctgtctcaaaataattattacaaaataaaaaaattttaagaggaagttaacaaaatacaaatggacaatatacaaatgaaaagatgcttacttccctagtaatgtaaaatgcaaattaaaatgtctttcggccaggcatggtggctcacgcctgtaatcccagcactttagggggccgagataggtggattatttgaggccaggggttcaagaccagcctggccaacatggtgaaaccccacctcttctaaaaatacaaaaattagccaggcgtggtgctgggcgcctgtagacccagctacttgggaggctgaggcaggagaattgcttgaacccaggaggtggaggttgccgtgagccgagatcgcaccattgcactccagcctgggcgacggagtgagactctgtctcagaaaaaaaaaaaaaaaaaaaagtctttctacctctcaggttggcaaatgtctatagactgataatatccagtcctcctaaaggtatgaaaagcagaagttcctatattgctagtgaaaatacacatgtctagaagaaatttggcgatactggttcagcttttcagatgttcgtacctatactgcaactctccctctaatataaagaagtgtgtacaagcatgttactgaagggttatttgtaatcacaaaaaaatggaaaaccagccaatgtccaataacaagaaaatttttaaactgcagtccatccatacagtggaatactacccagtcagaataaaatatagaaagatgtccaagatacactttggacaaaaaaaaaaaaagctagctgcaaaagtttatatacaacattcccctttttgttaaaaagaagtttgtatttatttttaaaaatagaggaatatgcaccaaactgttcataataattatttatcgggattatagggaacatttgctttccatattacatatcttgcaatgtttgaatgttttttgttttaacttttaggttcagggatagatgtgaaggtttgttacatacgtaaactcatgtcacggggtttgtggtacagattatttcatcacccaggtattaagtccagtacccaatagttatcttttctgctcctctccctcctcccaccctcccctgctcaagtagccccccgtgtctgttgtttccttctttgcattcataacttacatttagctcccacttagaagtgagatcatgtggtatttggttttctgttcctgtgttagtttgctaaggatgatggcctccagctccatccatgttcccacaaaagacatgatcttgttcatttttatggctgcatagtattccatggtatatatgtaccacattttctttatccaatctgtcactgatgggcatttaggatgattccatgtctttgccattgtgaacagtgctgcaatgaacattcacgtgcatgtgcctttatggtagaataatttatattcctctgcatattacacccagtaatggggctgctaggtcaaacagtagttctgcttttagctctctgaggaatcgccatactgttttccacaaaggttgaactaatttacactcccagcaatagtgcataagggttcccttttctccacaaccttgccagtatctgttattctttgacttttttataatggctatgctgactagtgtgagatagtttctcattgtggttttgatttgcatttctctaatgatcagtgatgttgagctcttttatgtttgttggtcgcatgtgtgtcttcttttaaaaagtgtctgctcatgtcctttgcccacttttttttttttgagacggagtctcgctctgttgcccaggctggagtgcagtggcaccatctcagctcactacaagctccgccttccaggttcaagcaattccctggcctcagcctccctagtagctgggattacaggtgcctgccaccaacctggctaatttttgtatttttaatagagacagggtttcgtcatgttggccatgctggtctcgaactcctgacctcaggtgatctgcccacctcggtctcccaaagtgctgggattacaggtgtgagccactgtacctggcctttgcccactttttaatgttgttgtgtttttgtttttttttttgagatggggtctcactgtcatccaggctggagtgcagtgctgtgatcttggctcactgcaacctcctgcctcccaggctcaagcaatcctcccacttcagcctcccaagtagctgggactacaggcgcacaccaccatgcctgactaacattttgtattttttatagagatgggatttcatcatgttggcctggctggtctcagactcctggactcaagccatccacccaccttggccttccaaagagctggaattacaggcatgggccaccaagccctttttcttttcttttttttttttttaatttattacttgcaattataaaaaaaaaaaaaaagaataaaatccccagcaagagactaaagctgagtggccaaggcaggagttgaggttaggagtttgacaccagcctgggcaacatagcaagacttcgtctctacaaaaaagtttaaaaattagccagggccgggcgcagtggctcacgcctgtaatcccagcactttgggaggccgaggcgggtggatcacctgaggtcgggagttcgagaccagtctcaacatggagaaatcccgtctctactaaaaatacaaaattacccgggcatggtgatgcatgcctgtaatcccatctactcacgaggctgagacaggagaatcgcttgaacctgggaggcggaggttgcggtgagccgagatcgcgccattgcactccaccagcctgggcaacaagagcgaaactccgtctcaaaaataaaataaaataaaataaaataataaaaagaaaaattagccaggcatggtggtacatgcctgtagtcccacctactcaggagactgaggcaggaggattgcttgagcccaggagtttgagattacagtgagccatgatggtgccactgcactgcagcctgggcaacagagcaagactccatctctagaaaatgtttaaaatatatatatatatattcagtactgaattcaaaaggctgccagaatgctatcactgaactttaaccaacaaacataaatgataaacataatacctggtaaaattcgattccttgatctgttatgaagacaatttcagttgaactagtccagcagaatcctagaatgttggcattcttagtctaagaaaaattttttaaaaatatttttaattaataagaaaaaacacatataactctcttcaaaagcttcacaaactctgcagtttgtcattctttaatgaacgttccccggaatgtttactaattaacaaaacaaattttcttttaaatacaatgttccctgatttttgcccataactcttcattcaagaacctgaatcctaattccttctactaaacagaacaggagaagtctgtgttttgtagaaaagtaactgaccagagctcacagacagcagcttctacctgcaggaatcaccatactgccaacattcttagtcacccacgttataaaaatggttattaaaaatgtacaaaggcctaagggtctttagtgagtgttgactaaaatgggttgaggaccctgagacacacacccgactcgcttgagggcagacaggtttgagaagggccgggctgagggtctcttcacacggggccactgcagggcaggcaggacagtggtggggatgcacctctcctcaccaaagagtccgccctgaactccattgagcaaaacagtcacaaaaatgcagaaagccctaccccaaccactagcagcttctgtcagcgcccaaggtgccacactgccaattttagctcagctccctctagcctagtttactacacccagcaaatctcattaatgtggattagaatcaacacctaggagaagaaagaaagagtaaggacaagacaaagacaacaaattgaggaaaggaaacttcaggaaacagaaaaagaaactcctcaccagaaacctccactccaggtggctgtgaggcatcccagggcccagacccagatgtgctgtcagcccagtgaggagaaaaagggcaagacagacgacagccccaagggctagcactactgggtgttcaccacgcatcatccattgaaccctccccctccaaaggaacaagctttcaaacttagaaaactgttcagtgtcacaaagcaaacaccccgcctgactccagtttgggaatcaacatgagggacagtctgacttcaagtctgtgctccctgcgaccccaatgccccgctctccactacataacccagctcaacaccactgacaccagcagctgagaaagggcctggggtcataccttgcactcctgtgtgtattccagctgggaattatcagggataaaattacaaaaatcctgaaaggaaaaacacacagacacacacaaatttggattaggcagcatactgccaacctacgttggcatactacaagacaagaaaaataaatattaacttaaaaagtgaccagaaaataactgaagacaaccaaaacacaggaaagataaaaagaccaattcggatcatctgtctcaacagcagcaggcttacgattcaattttttttaagttaatacaaatattcagttacagtttagtaactcctttcaaaaattcattcctcaagcagctgatgtcagagaaatgtgttgctgcactaagaggcttccccaagactttaacacttaaaactgatggaagaaactaacagaggattctgcctgtttctaacagccttccctctactctacaaacggcaatggtgaacatttacacgggctaaagtgcctgtaggctgcttcaacttggaatatctgctcctatcagatctagcactcagaaatgagagatgaaaaggctaattcacaaagtagccaaaaatacctcacatattctatgctgctatcaagcaatacaaaagacacatgaagttccaaattattttttaacaatttttaagggagactgaggcgagagaatcacttgagcctgagagatcgaggctgcagtgagccgagatcacatcactgcactccagcctgggcaacaaaggaagactggctcaaaaaaaaatttttaatttaatttaaaaatcaaactaaggtcatttttttaacccactcaaatgtctttttcgtttttgaaggctctaatacaatgcaacataactatacctttcacaacagtaagataataaaagtttcctttaacactgaaaatttgcgattccttctcttccaaatgtatttctaatgccctttaatgctgtattttaaagataagtcttaccacagtctttgaggtcctctgaacagccaatatcttattttctaaggaaaacttaatgcacttcacttctcctttgtcatccattctttaagaagaaagattgtgttagtagttaaataaccgaattctagctactaccatttattgaaaaggcaaaagacacaatctatattcaggaggcagcaaattctagtctaaaattaaaattatgtttcggaagccatcagtaggacctcttttcaaactaccaaatccaactggaaagaacttgctgggaaacttacagtattatgggtaacaagtgattgaagaattcagatcacacacacatatcacctgagaattgttccaacataaataactatagacccgctcaggagccttctccgtaactgctgtttctctctcacagcaaagcttctggaaagaactatctacttgtgcatctcacagcacattcattatgcaacccagatggctccactacagtgtctcatgaccgcctcagacagatgttaaaaagtgaactcagctgggcacagcggcctacacctgtaatcccagcactgtgagaggatgaagcaggaggatcacaggaattcgagaccagcctcagcaacacagtgagaccccgtctctattccaatacatacattttttaaattaaaaattcatttaaaaaaaaaaaactcaagggatggattacagaagggcccaaggaaacttttcggggtctgaacatgttcattgccttgattgtggtgatggtttcatgggtgtatacatgtcaaaactcacatattgcataatattaagtgtgtacagtttattatgtgtcaactatgcctcaataaagctgcttttaaaaatc

SEQ ID NO: 122 - DNA, 25 bp, Homo sapiens
acgttttacaaacagcccatgttct

SEQ ID NO: 123 - DNA, 25 bp, Homo sapiens
ccagtccaacagcaccaatatcttc

SEQ ID NO: 124 - DNA, 25 bp, Homo sapiens
gtcataattgatgacagggtaagta

SEQ ID NO: 125 - DNA, 25 bp, Homo sapiens
tctgaaaccactatcgcaagaaatt

SEQ ID NO: 126 - DNA, 25 bp, Homo sapiens
aatatatcaaagcatgtgaagatgc

SEQ ID NO: 127 - DNA, 25 bp, Homo sapiens
ctgacaagccagcatagggcattcg

SEQ ID NO: 128 - DNA, 25 bp, Homo sapiens
ctgggccaccatgttggccaagata

SEQ ID NO: 129 - DNA, 25 bp, Homo sapiens
tagttgtgctgaaagacattatgac

SEQ ID NO: 130 - DNA, 25 bp, Homo sapiens
gacttcatccagatatgtaaaaata

SEQ ID NO: 131 - DNA, 25 bp, Homo sapiens
gagtctctcctccctgccagctctc

SEQ ID NO: 132 - DNA, 25 bp, Homo sapiens
gcagatcaacccccactcgcccaag

SEQ ID NO: 133 - DNA, 25 bp, Homo sapiens
cttcgtggactacagagctggaagc

SEQ ID NO: 134 - DNA, 25 bp, Homo sapiens
cccggtacacatgacattcacgccc

SEQ ID NO: 135 - DNA, 25 bp, Homo sapiens
gcaccctgtgaccactgacattaag

SEQ ID NO: 136 - DNA, 25 bp, Homo sapiens
tatcacgaccgagaaaacttccaaa

SEQ ID NO: 137 - DNA, 25 bp, Homo sapiens
gtagttctgctgcactgatataacc

SEQ ID NO: 138 - DNA, 25 bp, Homo sapiens
gaacctgctactggccaacaccacc

SEQ ID NO: 139 - DNA, 26 bp, Homo sapiens
cccgacttatagccagtaatgtcacc

SEQ ID NO: 140 - DNA, 25 bp, Homo sapiens
ccgaaataaaacaaaagatgttaaa

SEQ ID NO: 141 - DNA, 25 bp, Homo sapiens
atccacacctaatgtccacatggtc

SEQ ID NO: 142 - DNA, 25 bp, Homo sapiens
cgtccattgcacacacacagacttt

SEQ ID NO: 143 - DNA, 25 bp, Homo sapiens
aacagctgcagcatagctaacccta

SEQ ID NO: 144 - DNA, 25 bp, Homo sapiens
ggcccaggccatccagaccaccttc

SEQ ID NO: 145 - protein, 1301 aa, Artificial Sequence; identical to SEQ ID NO: 22
  source: /note="Description of Artificial Sequence: Synthetic polypeptide"

SEQ ID NO: 146 - protein, 1459 aa, Artificial Sequence
  source: /note="Description of Artificial Sequence: Synthetic polypeptide"
MAAGPAPEARSLMDEQTFLDNFNNLKYPRKTYLCYEVELLVGENHIPLDDYKGFVHNEGFDMGLERCHAELIFLERMASWNLDTELRYRITVFISWSPCPECADELVKFLRENRHVNLRIFAARIYDWYQGYEAGLRALKAAGAEVAMMTLHEFEYCWNNFVDHQQDEDTPFPPWDNLVARSEELSQRLEGILQPSVLVFCWPSQVSVTAAHSDIMSQASRAWEKRRDPPSGGSSGGSSGSETPGTSESATPESSGGSSGGSMRELDYRIGLAIGTNSIGWGVIELSWNKDRERYEKVRIVDQGVRMFDRAEMPKTGASLAEPRRIARSSRRRLNRKSQRKKNIRNLLVQHGVITQEELDSLYPLSKKSMDIWGIRLDGLDRLLNHFEWARLLIHLAQRRGFKSNRKSELKDTETGKVLSSIQLNEKRLSLYRTVGEMWMKDPDFSKYDRKRNSPNEYVFSVSRAELEKEIVTLFAAQRRFQSPYASKDLQETYLQIWTHQLPFASGNAILNKVGYCSLLKGKERRIPKATYTFQYFSALDQVNRTRLGPDFQPFTKEQREIILNNMFQRTDYYKKKTIPEVTYYDIRKWLELDETIQFKGLNYDPNEELKKIEKKPFINLKAFYEINKVVANYSERTNETFSTLDYDGIGYALTVYKTDKDIRSYLKSSHNLPKRCYDDQLIEELLSLSYTKFGHLSLKAINHVLSIMQKGNTYKEAVDQLGYDTSGLKKEKRSKFLPPISDEITNPIVKRALTQARKVVNAIIRRHGSPHSVHIELARELSKNHDERTKIVSAQDENYKKNKGAISILSEHGILNPTGYDIVRYKLWKEQGERCAYSLKEIPADTFFNELKKERNGAPILEVDHILPYSQSFIDSYHNKVLVYSDENRKKGNRIPYTYFLETNKDWEAFERYVRSNKFFSKKKREYLLKRAYLPRESELIKERHLNDTRYASTFLKNFIEQNLQFKEAEDNPRKRRVQTVNGVITAHFRKRWGLEKDRQETYLHHAMDAIIVACTDHHMVTRVTEYYQIKESNKSVKKPYFPMPWEGFRDELLSHLASQPIAKKISEELKAGYQSLDYIFVSRMPKRSITGAAHKQTIMRKGGIDKKGKTIIIERLHLKDIKFDENGDFKMVGKEQDMATYEAIKQRYLEHGKNSKKAFETPLYKPSKKGTGNLIKRVKVEGQAKSFVREVNGGVAQNGDLVRVDLFEKDDKYYMVPIYVPDTVCSELPKKVVASSKGYEQWLTLDNSFTFKFSLYPYDLVRLVKGDEDRFLYFGTLDIDSDRLNFKDVNKPSKKNEYRYSLKTIEDLEKYEVGVLGDLRLVRKETRRNFHSGGSGGSGGSMKTTTQELKQYITRLFQLSNNETWECEALEEAAENILPERFINNSLLAHLTLNTYTYYNDELHELSIYPFLMYANDQLISIGYLDHFDMDFLYLTDTKNTIIDERHLLKQGENNHE

SEQ ID NO: 147 - protein, 1430 aa, Artificial Sequence
  source: /note="Description of Artificial Sequence: Synthetic polypeptide"
MEASPASRPRPLMDPHMFTGNFTNNPRVFGLHQTYLCYEVKRQGPDGTRDLMNEQRDFLCNQAKNHFSGSEDHHAERCFLDRIPSWQLDPAQTYRVTCFISWSPCFSCAQEVAEFLHENPHVNLRIFAARIYDYLPRYEEGLQMLQNAGAQVSIMTSEEFGHCWDTFVDRQGHPFQPWEGLDEHSQALSGRLQAILQNQGNSGGSSGGSSGSETPGTSESATPESSGGSSGGSMRELDYRIGLAIGTNSIGWGVIELSWNKDRERYEKVRIVDQGVRMFDRAEMPKTGASLAEPRRIARSSRRRLNRKSQRKKNIRNLLVQHGVITQEELDSLYPLSKKSMDIWGIRLDGLDRLLNHFEWARLLIHLAQRRGFKSNRKSELKDTETGKVLSSIQLNEKRLSLYRTVGEMWMKDPDFSKYDRKRNSPNEYVFSVSRAELEKEIVTLFAAQRRFQSPYASKDLQETYLQIWTHQLPFASGNAILNKVGYCSLLKGKERRIPKATYTFQYFSALDQVNRTRLGPDFQPFTKEQREIILNNMFQRTDYYKKKTIPEVTYYDIRKWLELDETIQFKGLNYDPNEELKKIEKKPFINLKAFYEINKVVANYSERTNETFSTLDYDGIGYALTVYKTDKDIRSYLKSSHNLPKRCYDDQLIEELLSLSYTKFGHLSLKAINHVLSIMQKGNTYKEAVDQLGYDTSGLKKEKRSKFLPPISDEITNPIVKRALTQARKVVNAIIRRHGSPHSVHIELARELSKNHDERTKIVSAQDENYKKNKGAISILSEHGILNPTGYDIVRYKLWKEQGERCAYSLKEIPADTFFNELKKERNGAPILEVDHILPYSQSFIDSYHNKVLVYSDENRKKGNRIPYTYFLETNKDWEAFERYVRSNKFFSKKKREYLLKRAYLPRESELIKERHLNDTRYASTFLKNFIEQNLQFKEAEDNPRKRRVQTVNGVITAHFRKRWGLEKDRQETYLHHAMDAIIVACTDHHMVTRVTEYYQIKESNKSVKKPYFPMPWEGFRDELLSHLASQPIAKKISEELKAGYQSLDYIFVSRMPKRSITGAAHKQTIMRKGGIDKKGKTIIIERLHLKDIKFDENGDFKMVGKEQDMATYEAIKQRYLEHGKNSKKAFETPLYKPSKKGTGNLIKRVKVEGQAKSFVREVNGGVAQNGDLVRVDLFEKDDKYYMVPIYVPDTVCSELPKKVVASSKGYEQWLTLDNSFTFKFSLYPYDLVRLVKGDEDRFLYFGTLDIDSDRLNFKDVNKPSKKNEYRYSLKTIEDLEKYEVGVLGDLRLVRKETRRNFHSGGSGGSGGSMKTTTQELKQYITRLFQLSNNETWECEALEEAAENILPERFINNSLLAHLTLNTYTYYNDELHELSIYPFLMYANDQLISIGYLDHFDMDFLYLTDTKNTIIDERHLLKQGENNHE

SEQ ID NO: 148 - protein, 4 aa, Artificial Sequence
  source: /note="Description of Artificial Sequence: Synthetic peptide"
SGGS

SEQ ID NO: 149 - protein, 1070 aa, Bacillus sp.
MRELDYRIGLDIGTNSIGWGIIELSWNKDREQYEKARIVDKGVRMFDKAEIPKTGASLAEPRRIARSSRRRLNRKSQRKKDIRNLLVQHEIISQKELASLYPLTKSSMDIWDIRLDGLDRLLDRFEWTRLLIHLAQRRGFKSNRKSELKDVETGKVLSSIQANEKRLSLYRTVGEMWMKNEDFSKYDKRRNSSNEYVFSVSRADLEKEIVTLFEAQRKFQSSYASADLQKTYLQIWAHQLPFASGNAIVNKVGYCSLLKGKEKRVPKATYTFQYFSTLDQINRTRLGPNFQPFTKEQRDVILDEMFNRTDYYKKKTIPEVTYYDIRKWLALDETIQFKGLTYDPNEELKKIELKSFINLKPFYEIKKVVTNYAKKTNEAFSTLDYDTFAYALTVYKTDKDIRSYLKKSNNLSKCCYDDQLIEELLTLSYTKFGHLSFKAINHVLPIMQEGRTYQEAIHQLGYDATNLKKENRSMFLPLFPDEITNPIVKRALTQARKVVNAIIRRYGSPNSVHIELARELSKSHDERTKIMKAHDENYKKNKGAISILIENGILNPTGYDIVRYKLWKEQGERCAYSLKQIPANTFFNEMKKERSGSPVLEIDHILPYSQSFIDSYHNKVLVYGDENQKKGNRIPYTYFLEGNKDWESFESYVRLNSFFSKKKRGYLLKKAYLPRESNMIKERHLNDTRYASSYLKNFIEKNLKFKEVEGSTRKKHVQTVNGIITAHLRKRWGLEKDRQETYLHHAMDAIIVACTDHHMVTKVTEYYQIKESNKSIRKPYFPLPWVGFREEILSHLARQPIARKISEELKIGYQSFDYILVSRMPKRSVTGAAHEQTIMKKGGIDKKGKTIIIKRVYLKDIKFDENGDFKMVGKEQDLATYEAIKQRYIEYGKESKKAFETPLYKPSKKGKGNLIKKIKVEVQTKSFVREVNGGVAQNGDLVRVDLFEKDNRYYMIPIYVMDTVHSELPNKAVTSSKGYEQWLTIDNSFTFKFSLYPYDLVRLVKGNEDRFLYFSTLDINSDRLNFKDVNKPSKQAENRYSLKTIENLEKYEVGVLGDLRFVRQEIRKNF

SEQ ID NO: 150 - RNA, 19 nt, Bacillus sp.
gucauaguuccauuauugc

SEQ ID NO: 151 - RNA, 84 nt, Bacillus sp.
gcuuugauguuucuaugauaagggcuuaggcccguggcguuggggaucgccugcccauuuuaaugggcuucuccccaucuauuu

SEQ ID NO: 152 - DNA, 6 bp, Artificial Sequence
  source: /note="Description of Artificial Sequence: Synthetic oligonucleotide"
  modified_base (1)..(4): a, c, t, g, unknown or other
nnnncc

SEQ ID NO: 153 - RNA, 21 nt, Bacillus sp.
gucauaguuccauuaaagcca

SEQ ID NO: 154 - RNA, 85 nt, Bacillus sp.
uggcuuugauguuucuaugauaaggguuucgacccguggcgucggggaucgccugcccauugaaaugggcuucuccccauuuauu

SEQ ID NO: 155 - protein, 1071 aa, Bacillus sp.
MRELDYRIGLDIGTNSIGWGVIELSWNKDREQYEKTRIVDKGVRMFDKAEIPKTGASLAEPRRIARSSRRRLNRKSQRKKDIRNLLVQHEIISQKELTSLYPLSKSSMDIWDIRLDGLDRLLDRFEWARLLIHLAQRRGFKSNRKSELKDVETGKVLSSIQVNEKRLSLYRTVGEMWMKNADCSKYGKRRNSPNEYVFSVSRADLEKEIVTLFEAQRKFHSSYASVDLQKTYIQIWAHQLPFASGNAIVNKVGYCSLLKGKEKRVPKATYTFQYFNTLDQINRTRLGPNFQPFTKEQRDIILDKMFQRTDYYKKKTIPEVTYYDIRKWLALDETIQFKGLTYDPNEELKKIEMKPFINLKPFYEIKKVVTNYAKKTNEVFSALDYDTVAYALTVYKTDKDIRSYLKRSNNLSKRCYDDQLIEELLTLSYTKFGHLSFKAINHVLPIMQEGRTYQEAIHQLGYDTTNLKKENRSMFLPIIPDEITNPIVKRALTQARKVVNAIIRRYGSPNSVHIELARELSKSHDERKKIMTAHDENYKKNKGAVSILIDNGILNPTGYDIVRYKLWKEQGERCAYSLKKIPANTFFNELKKERSGPPVLEVDHILPYSQSFIDSYHNKVLVYGDENQKKGNRIPYTFFSEEDKEWESFESYVRSNSFFSKKKRGYLLKKAYLPRESNLIKERHLNDTRYASSYLKNFIEKNLKFKEAVGITRKKYVQTVNGVITAHLRKRWGLEKDRQETYLHHAMDAIIVACTDHHMVTKVTEYYQIKEGNKSIKKPYFPLPWMGFREEILSHLESQPIARKISEELKIGYQSPDYILVSRMPKRSVTGSAHDQTVMKKGDIDKKGKTIIIKRVHLKDIKFDENGDFKMVGKEQDLATYEAIKQRYLEYRKESKKAFETPLYKPSKKGKGNLIKKIKVEVQTKSFVREINGGVAQNGDLVRVDLFEKDNRYYMVPIYVVDTVRSELPNKAVTSSKGYEQWLSIDNSFTFKFSLYPYDLVRLVKGDEDRFLYFSTLDINSDRLNFKDVNKPSKQAEYRYSLKTIENLEKYEIGVLGDLRLVRQETRKIFK

SEQ ID NO: 156 - RNA, 27 nt, Bacillus sp.
gucauaguuccauuaaagccauugcug

SEQ ID NO: 157 - RNA, 93 nt, Bacillus sp.
acagcaauggcuuugauguuucuaugauaagggcuucggcccguggcguuggggaucgccugcccauuuuaaugggcuucuccccaucuauuu

SEQ ID NO: 158 - RNA, 21 nt, Bacillus sp.
gucauaguuccaugaaagcca

SEQ ID NO: 159 - RNA, 85 nt, Bacillus sp.
uggcuuugauguuucuaugauaaggguuucggcccguggcgucggggaucgccugcccauuccgaugggcuucuccccauuuauu

SEQ ID NO: 160 - DNA, 6 bp, Artificial Sequence
  source: /note="Description of Artificial Sequence: Synthetic oligonucleotide"
  modified_base (1)..(2): a, c, t, g, unknown or other
  modified_base (4)..(4): a, c, t, g, unknown or other
nnrncc

SEQ ID NO: 161 - protein, 1337 aa, Enterococcus sp.
MKKDYVIGLDIGTNSVGWAVMTEDYQLVKKKMPIYGNTEKKKIKKNFWGVRLFEEGHTAEDRRLKRTARRRISRRRNRLRYLQAFFEEAMTALDENFFARLQESFLVPEDKKWHRHPIFAKLEDEVAYHETYPTIYHLRKKLADSSEQADLRLIYLALAHIVKYRGHFLIEGKLSTENISVKEQFQQFMIIYNQTFVNGESRLVSAPLPESVLIEEELTEKASRTKKSEKVLQQFPQEKANGLFGQFLKLMVGNKADFKKVFGLEEEAKITYASESYEEDLEGILAKVGDEYSDVFLAAKNVYDAVELSTILADSDKKSHAKLSSSMIVRFTEHQEDLKKFKRFIRENCPDEYDNLFKNEQKDGYAGYIAHAGKVSQLKFYQYVKKIIQDIAGAEYFLEKIAQENFLRKQRTFDNGVIPHQIHLAELQAIIHRQAAYYPFLKENQEKIEQLVTFRIPYYVGPLSKGDASTFAWLKRQSEEPIRPWNLQETVDLDQSATAFIERMTNFDTYLPSEKVLPKHSLLYEKFMVFNELTKISYTDDRGIKANFSGKEKEKIFDYLFKTRRKVKKKDIIQFYRNEYNTEIVTLSGLEEDQFNASFSTYQDLLKCGLTRAELDHPDNAEKLEDIIKILTIFEDRQRIRTQLSTFKGQFSAEVLKKLERKHYTGWGRLSKKLINGIYDKESGKTILDYLIKDDGVSKHYNRNFMQLINDSQLSFKNAIQKAQSSEHEETLSETVNELAGSPAIKKGIYQSLKIVDELVAIMGYAPKRIVVEMARENQTTSTGKRRSIQRLKIVEKAMAEIGSNLLKEQPTTNEQLRDTRLFLYYMQNGKDMYTGDELSLHRLSHYDIDHIIPQSFMKDDSLDNLVLVGSTENRGKSDDVPSKEVVKDMKAYWEKLYAAGLISQRKFQRLTKGEQGGLTLEDKAHFIQRQLVETRQITKNVAGILDQRYNANSKEKKVQIITLKASLTSQFRSIFGLYKVREVNDYHHGQDAYLNCVVATTLLKVYPNLAPEFVYGEYPKFQAFKENKATAKTIIYTNLMRFFTEDEPRFMKDGEILWSNSYLKNIKKELNYHQMNIVKKVEVQKGGFSKESIKPKGPSNKLIPVKNGLDPQKYGGFDSPVVAYTVLFTHEKGKKPLIKQEILGITIMEKTRFEQNPILFLEEKGFLRPRVLMKLPKYTLYEFPEGRRRLLASAKEAQKGNQMVLPEHLLTLLYHAKQCLLPNQSESLAYVEQHQPEFQEILERVVDFAEVHTLAKSKVQQIVKLFEANQTADVKEIAASFIQLMQFNAMGAPSTFKFFQKDIERARYTSIKEIFDATIIYQSTTGLYETRRKVVD

SEQ ID NO: 162 - RNA, 16 nt, Enterococcus sp.
guuuuagagucauguu

SEQ ID NO: 163 - RNA, 74 nt, Enterococcus sp.
aacauagcaaguuaaaauaagguuuuaaccguaaucaacuguaaaguggcgcuguuucggcgcuuuuuuuguuu

SEQ ID NO: 164 - DNA, 3 bp, Artificial Sequence
  source: /note="Description of Artificial Sequence: Synthetic oligonucleotide"
  modified_base (1)..(1): a, c, t, g, unknown or other
ngg

SEQ ID NO: 165 - protein, 1436 aa, Enterococcus sp.
MAKNILGLDLGTNSIGWALVQQDFENKEGNILGMGSRIIPMSQDILGEFGKGNSISQTAERTGYRGVRRLRERHLLRRERLHRVLHLLGFLPKHYDEKIDFTQRFGKFINQAEPKLAFDSEFLFKDSFHEMLADFKQNQPEFLKDKNGEDCLVPYDWTIYYLRKKALTQKIEKYELAWLILNFNQKRGYYQLRGEEEKENPNKLVGFHSLKIVDVIPDAETNKKGETWYSLHLENGWVYRRSSKISLADWKDKVRDFIVTTDLNDDGSEKLDKDGIVKRSFRAPSADDWTLLKKKTEKDIDNSNKTVGTYIYDNLLLNPKQKIKGKMVRTIERKFYKQELEQILKTQKEFHSELQSENLLQDCVRELYRNNEQHQQMLEAKDFVHLFLNDIIFYQRPLRSQKSSISNCTLEFRKSKNENGEEVIHRLKVIAKSNPYYQEFRLLQWVQNLAIYTKDDDKNVTNEFLKSTQDWEDLLRWLHSKKEIKQDALIKFLIEKKGLKGKALTIEVAKYRWNYVQDKDYPGNETRYLIQSRLDKVEYAPKDFLTYENEMALWHIIYSINDKIEYEKALKSFANKKGLDEVTFVEAFKKFPPFKSDYGSFSEKAIKKLLPLMRFGTQWNWDNIDQNSKERIGKILTGEYDENIKGRVREKARHLNSETDFQALPLWLAQYVVYGRHSEADIAGKWNSVDDLKQFLDDFKQHSLRNPIVEQVITETLRAVKDIWNFYGKGAKDFFSEIHIELGREMKNTADERKRITTMVTDNENTNLRIKALLAEMALDQNVDNVRPYSPMQQEILKIYEEGVLNAEENIDDDILKISKTAQPSATDLKRYKLWLEQKYRSPYTGQMIPLNKLFTPEYEIEHIIPQSRYFDDSMSNKVICEAAVNKLKDNQIGLVFIKNHHGEVVDFGMGKQVKILEVSDYEDFVKQNYNKNRGKRNKLLLEDIPEKMIERQLNDTRYISKYITQVLSNIVRDDKEGSKDDGVNSKNIVPGNGKITTRLKQDWGLNDVWNDLVLPRFERMNTLTNSNDFTSKNTHGKTIPTVPIELSKGFSKKRIDHRHHAMDALVIACATRDHVNLLNNESSKSDTKRYDLNRKLRKYEKVAYNDPKTGERIEKEVPKDFIKPWETFTEDTRTLLENIVISFKQNLRVINKATNYYEKIENGKKVKVEQKGINWAVRKALHKETVSGQVHLDRIKVAKGKILTATRKTLDASFNEKTIESITDTGIQKILLNYLKSKDNNPEVAFSPEGIEELNKNIRLYNDGKAHQPILKVRVFEQGSKFTLGETGNKTTKFVEAAKGTNLFFGIYEDKSGKRSYETIPLNIVIERQKQGLQAVPETNEKGKQLLFTLSPNDLVYVPEEGVFDENNIKVDRIYKVVSFSTYQCFFVRNDVSTSVVNKVEYSALNKMEKSIDNIMIKENCVKLNVDRLGKISKA

SEQ ID NO: 166 - RNA, 16 nt, Enterococcus sp.
guugugaguuccuuuc

SEQ ID NO: 167 - RNA, 78 nt, Enterococcus sp.
gaaaggaacucacaauaaggauuauuccguugugaaaacauuuagcgccucgacuaucuucggggcuuuuuuauuuuu

SEQ ID NO: 168 - DNA, 7 bp, Artificial Sequence
  source: /note="Description of Artificial Sequence: Synthetic oligonucleotide"
  modified_base (1)..(2): a, c, t, g, unknown or other
nnraaty

SEQ ID NO: 169 - protein, 1456 aa, Empedobacter sp.
MMIKNILGLDLGTNSIGWALIKQDFENKHGEILGMGSRIIPMSQDILGDFGKGNSISQTADRTKYRSVRRLRERFLLRRERLHRVLHLLNFLPQHYASQIDFEKKFGKFKSETEPKLAWENWGGKFSFLFQNSFNEMLEDFKAAGQGLKIPYDWTIYYLRKKALSQKIEKEELAWILLNFNQKRGYYQLRGEEEEENPNKLVEFYSLKIVDVVADEPQKGKSDIWYSLILENGWVYRRASKIPLFDWKDKTRDFIVTTDLNDDRSVKTDKEGNEKRSFRAPSENDWTLVKKKTEQEIDQSHKTVGTYIYETLLLNPKQKIKGKLVRTIERKFYKDELKQILEKQKEFHQELKNDDLYNDCIRELYRNNEAHQLTLSKKDFVHLLMDDLIFYQRPLRSQKSSISNCTLEFRKYKDENGIEHTQYLKAIPKSNPYYQEFRLWQWMYNLNIYRKDDEANVTKEFLNTNKDFESLFEFLNNRKEIEQKPLIKFLLEQKDINKKLLNAEAEKYRWNYVEDKKYPCNETKTMISSRLDKVENISDDFLTRDIEQKIWHIIYSVNDKIEYEKALKSFATRNDLDENSFIEAFKKFSPFKSEYGSFSEKAIKKLLPLMRLGKYWYEDEIVKHSDIYFKNIENLLGDFSNRDKKISEEDKEKWNKSINLKLQEELKDFQTAEIDLFQGLRLHIAQYLVYGRHSEASMIGKWNSAEDLEEFLKDFKQHSLRNPIVEQVITETLRVVKDIWLKYGNGAKDFFNEIHIELGREMKLPADDRKKLTNQISENENTNFRIKALLAEMMNDSSVENVRPFSPMQQEILKIYEDDVLKSDIEIEDDILKISKTAQPSPSDLKRYKLWLEQKYKSPYTGQIIPLNKLFTPEYEIEHIIPQSRYFDDSFSNKVICESAVNKLKDNYIGLEFIKQFGGTIIELGFGKSIKVFETKEYEDFVKKHYANNQGKRNKLLMEDIPEKMIERQMNDTRYISKYISGVLSNIVRVEDGSDEGVNSKNIVPGNGKITTQLKQDWGLNDVWNDLILPRFERMNQLTNSKVFTAWNENYQKFLPTVPIEYSKGFSKKRIDHRHHALDALVIACATKDHVNLLNNQSAKSDTKRYDLKKKSMKFEKVVYNDAKTGEKIEREVPKQFLKPWENFTLDVKHNLETIIVSFKQNLRVINKATNYYEKYVEKDGTKNKERVEQTGTNWAIRKPMHKDTVSGKVDLPWVKVPKGKILTATRKSLDSSFDLKSIGSITDTGIQKILKNYLAFKDGNPELAFSPEGIDDLNKNIEKYNDGKPHQPINKVRVFELGSKFQVGQSGNKKDKYVEAAKGTNLFFAVYEDEKGKRNYETIPLNEVIERQKQGLSVVDLKGTNDFYLCPNDFVYIPSGDELENINNVDFKDIKKEINERIYKVVSFTGNRLSCIPYMVATTIVNKLEFTQLNKIEFTKEKEICIKLNVDRLGNISKA

SEQ ID NO: 170 - RNA, 18 nt, Empedobacter sp.
guugugaauugcuuucaa

SEQ ID NO: 171 - RNA, 75 nt, Empedobacter sp.
uugaaaagcaauucacaauaaggauuauuccguugugaaaacauucaaggcggggcaacucgucuuuuuucuuuu

SEQ ID NO: 172 - DNA, 6 bp, Artificial Sequence
  source: /note="Description of Artificial Sequence: Synthetic oligonucleotide"
  modified_base (1)..(2): a, c, t, g, unknown or other
  modified_base (4)..(5): a, c, t, g, unknown or other
nnrnnc

SEQ ID NO: 173 - protein, 1060 aa, Bacillus sp.
MKQTSYSLGLDIGIASVGYGLIDNDENIVDAGVRLFPEANSKNNDGRRKSRGSKRLIRRKRHRIARVKHLLKESGIDVSYENTVLTNPYEIRCKGLTLPLTNHELSIALLHLAKRRGVHNVKSMDQEKVKGNELSTKEQLTINDNLLEEKFICELQLERLNKEGIVRSHSNRFKTADYIKEIKNLLETQAKQNTLVTEEFIEKYIEIFSGRRKYYEGPGGESKYGWKGDIEKWYEGLMGKCTYFPKELRCVKHAYSAALFNLLNDLNNLSINREEDTKLSQYEKEQIIEKIFKVRKTPTLTQIAKLLKVDPTNIKGFRTKANGTPDFLSIKIYHDLKGIIDDKQLLDDIAFLDNVAQILTVWQDSQSIQEKLKTLNKNLDDKTIKEISELKKYTQTHSLSLKLINVLLPELWETTKNQMTILSELKLKPRKIDLHNCNEIPVNMINDLIVSPVVRRSLTQSIEMINQIIKDYGHPREIVIELAREKNSEEKKNFIKSLNEKNKQINDEVIEKLNASNHRDNKGMFNKVKLWILQDGHCLYSLKPIRLEDLLNNPNHYEIDHIIPKSVSFDDSMSNKVLVYQIENSKKGNRTPYQYLTSADKTITYEKFKANITQLAKSNHKISKKKLDYLLEERDINRFHIKKEFINRNLVDTRYATRSLINLLKYYFSEKDINVKVKSINGSFTDYLRKLWNFPKDREFYHKHHAEDALIIAMANKIFTTRKIFKEQNSVFSDEQILDGEVTNILSDDQFQAEFTEKFYKVQAIKKYDKYKYSHRVDKKPNRQLFDDTLYSTREFEGEEYYIGKIKDIYNLKDKRLKKIFTKSPEKILMYQHDSQTFKKLKQIMRSYEDEVNPLAKYHKETGEYLRKECKKGNGPIVKSLKYRVTKLGVHKDITHKYENSKNKVVILSLKPFRMDVFKENGVYKFITIRYCDLKETVNSYTISEHLYKAKLKAKDIKSMDSFKWSFYKNDLLEYNGELCTFKGVNDDKKNKIEVNWVEKNFAIYAEKKNLKSKQLVKSITKSTVKSLLKYTTDILGNRYPVRNEKLKLMIRKQTFRGDL

SEQ ID NO: 174 - RNA, 16 nt, Bacillus sp.
guuuuaguacucugug

SEQ ID NO: 175 - RNA, 73 nt, Bacillus sp.
cacagaaucuacuaaaauaaggcauaaugccguauuuaaucccaucauaauucugaugggauuuuuuauauuu

SEQ ID NO: 176 - DNA, 5 bp, Artificial Sequence
  source: /note="Description of Artificial Sequence: Synthetic oligonucleotide"
  modified_base (1)..(2): a, c, t, g, unknown or other
nnarv

SEQ ID NO: 177 - protein, 1090 aa, Rhizobium sp.
MNNLLYSFDIGTNSIGWCVFALDEVGDPCRIVDLGARIYADGRDPQTKTSLAVARREARAMSRRRDRSLRRRKATLRTMIEYGLMPAHKVEQETLLRKTGDREGGDEGFNPYALRARALGEKLPPFYIGRALFHLGQRRGFKSNRKTDRKDNDKGKIALGIDELRAAMHRSGSPTLGAWLAMRRADGHPVRLRAGSEVFDAEGYAFYPERSLLEDEFRQIWTAQAVHHPQLLTSERRAHLFRVMFYQRPLKKPLVGRCSFNPAEARLSRAHPLFQEFRLYKEVNDLEVVLPDQSHRKLTLDERNALVAKLKSSRKASFSVLRRTLKLTPDLAFNKESEARKDLLGDEINSALADAKMFGVRWGGFPRARQWEIITHLKEEENPARLSDWLKSEFGLDDERVVAIANIALPEGYGRLGETALASMLEEMKTAVIPESEAAKRCGYDHSNLAKEQDEGLDILPEYQEILERHIPPGTGDPDDIYDIRKGRITNPTVHIGLNQLRRVVNALIKRHGKPRHIVVELARDLQLSEKQKADVNRRIAKNTREAEGRSQKLIEMGQLDTGYNRLLLKLWEELNQDKPEDRVCIYSGKPIGIAMLFSGEVDIDHILPWSKTLDDSQANKLLCLKSANRQKRNRTPSDVPEWRDCYEEVLARAARLPKNKRWRFAADAMQQFEAEGGFLARQLTDTQYLSRMAFEYLSALFPSEEADKWGELRQRKRVHVVPGRLTELLRRNWGLNTLLPDHNLGEMAQEKNRKDHRHHAIDAAVIGVTSRSLLQRMSGAAARLDDVAFDDLVRTVVKDNPPWPGFREELLGCINRVTVSHKPDHGTVSRAAYAQGKGQTAGKLHNDTAYGITGLQDMKGSPLVVRRKPFMALEVKDIASIRDTELQSALYDAIGSLTEKKALQEALVRFRDRHPQFKGIRRVRVLEALSVIPIVDNNGKAYKGYKGDANYRYEVWETLDGRWHTEVVSMFDAHQPGWQSPFHRQHPAARRVLKLQQNDMVAYEHPADGYTIARVVKFSNDKRIYFASHRESGSLKARDADKGDPFTYFAKANNGLRDIKCRQVRIDAAGRVFDPGPQDREARQSKGRA

SEQ ID NO: 178 - RNA, 31 nt, Rhizobium sp.
gguugcggcuggaccgcguuuucugaucugc

SEQ ID NO: 179 - RNA, 79 nt, Rhizobium sp.
gcaaaucagaaaacgcggucuggccguuaacaagccucgaccagcaccagauaaggcggucccuccgggggccguuuuu

SEQ ID NO: 180 - DNA, 7 bp, Artificial Sequence
  source: /note="Description of Artificial Sequence: Synthetic oligonucleotide"
  modified_base (1)..(2): a, c, t, g, unknown or other
  modified_base (5)..(6): a, c, t, g, unknown or other
nnggnnc

SEQ ID NO: 181 - protein, 1108 aa, Brevibacillus sp.
MAIRSIKLKLKTRTGPEAQNLRKGIWRTHRLLNEGVAYYMKMLLLFRQESTGGQTKKELQEELVRHIREQQQKNRADKNTQALPLDKAFAALRQLYELLVPSSIGQSGDAQIISRKFLSPLVDPNSEGGKGTSKAGAKPTWQKKKEANDPTWEQDYEKWKKRREEDPTASVITTLEEYGIRPIFPLYTNTVADIAWLPLQSNQFVRTWDRDMLQQAIERLLSWESWNKRVQEEYSKLQEKMTQLNEQLEGGQEWISLLEQYEEQREQELIENMTAANDKYRITKRQMKGWNELYEQWSTVLPNASHEQYREALKRVQQRLRGRFGDAHFFQYLMKEEHHLIWKGNPQRIHYFVARNELKKRLEEAKQNATMTLPDARKHPLWVRFDARGGNLQDYYLTAEADNPRSRRFVTFSQLIWPNESGWMEKQDVEVELALSKQFYQQVTLQKNDKGKQEIEFKDKGSGSTFSGHLGGAKLQLERGDLEKEEKDFEGGEIGSVYLNIVIDFEPLQEVKNGRLQSPYGQVLQLVRRPNEFPKVTTYKSEELVEWIKSSTKDSAGVESLESGFRVMSIDLGLRTAAATSIFSVEESNDANAAGFSYWIEGTPLVAVHKRSYMLKLPGEQVEKQVREKRDERQDQQRRVRFQIRILSQVIRMAKKQNRERADELDHLSQALEKQKSLLDQTDRTFWNGIVCDLTDALREKEGGWEQAVVQIHRKAEEHVGKVVQAWRKRFDADERKGIAGLSMWSIEELDSLRKLLISWSRRTRNPREINCFEQGHTSHQRLLTHIQNVKEDRLKQLSHAIVMTALGYVYDEKKLEWFAKYPACQVILFENLSQYRSNMDRSTKENSTLMKWAHRSIPKYVHMQAEPYGIQIGDVRAEYSSRFHAKTGTPGIRCKMVSGHDLQGRRFENLQKRLISEQFLTEEQVKQLRPGDIVPDDSGEWFMTLSDGSEGKEVVFLQADINAAQNLQKRFWQRYNELFKVSCRVLIRGEEEYLIPKTKSVQAKLGKGLFVKKTDTVMKDVYVWDSQAKLKGKTTFTEESESPEQLEDFQEIIEEAEEAKGTYRTLFRDPSGVFFPEFVWSTQKDFWSEVKRRLYGKLRERFLMKTR

SEQ ID NO: 182 - RNA, 22 nt, Brevibacillus sp.
uggaaagcuucgagguuagcac

SEQ ID NO: 183 - RNA, 95 nt, Brevibacillus sp.
cgacgguuagaggccguaugucgauuugcuuuaauuucgugcgugugcauugucguccuccauuacagggcggcuaccacgaauagccacgaagu

SEQ ID NO: 184 - DNA, 4 bp, Artificial Sequence
  source: /note="Description of Artificial Sequence: Synthetic oligonucleotide"
  modified_base (4)..(4): a, c, t, g, unknown or other
dttn

SEQ ID NO: 185 - protein, 1429 aa, Chryseobacterium sp.
MTKNILGLDLGTNSIGWALIKQDFENKQGEILGMGSRIIPMDAGDMGKFAEGATVSKTADRTKYRSVRRLRERFLLRRERLHRVLHLLNFLPQHYASQIDFEKRFGKFKVETEPKLAWKNIEGKFSFLFQNSFNEMLEDFKANEQDLKIPYDWTIYFLRKKALSQKIEKEELAWILLNFNQKRGYYQLRGEEEEENPNKLVEFYSLKVVDVLADEPQKGKSEIWYSLVLKNGWIYRRASKIPLFEWKDKTRDFIVTTDLNDDGSIKKDKDGNEKRSFRAPGENDWTLVKKKTEQEIEQSHKTVGTYIYETLLLNPKQKIKGKLVRTIERKFYKDELKQILEKQKEFHQELQNDDLYNDCIRELYRNNEAHQLTLSKKDFVHLLMDDLIFYQRPLRSQKSSISNCTLEFRKYKDENGIEHTQYLKAIPKSNPYYQEFRLWQWIYNLNIYRKDDEVNVTKDFLNTTKEFENLFEFLNSRKEVDQKALLKYFKLNEKTHRWNFVEDKKYPCNETKTMISSRLDKVENISDDFLTRNIEQKIWHIIYSVNDKIEYEKALKSFARKHHLDETSFFEAFRKFPPFKSEYGSFSEKAIKKLLPLMRLGKYWNYADIDKYSRERIQKIITGEYDENIKDKIREKAIHLTKENDFQGLQLWLAQYLVYGRHSEASMIGKWNSADDLEVFLKDFKQHSLRNPIVEQVITETLRVVKDIWLKYGNGTKDFFNEIHIELGREMKLPADDRKKLTSQISENENTNLRIKALLAEMINDHSVENVRPFSPMQQEILKIYEDGVLNSDIEIEDDILKISKTAQPSPSDLKRYKLWLEQKYKSPYTGQIIPLNKLFTPEYEIEHIIPQSRYFDDSFSNKVICESAVNKLKDNYIGLEFIKKLGGTVVECGNGKSVTVLKEDQYEDFVKKHYANNRGKRNKLLMEDIPEKMIERQLNDTRYISKYISGVLSNIVRVEDGSDEGINSKNIVPGNGKITSQLKQDWGLNDVWNDLILPRFERMNQLTNSTDFTAWNENYQKFLPTVPIEYSKGFSKKRIDHRHHALDALVIACATKDHVNLLNNQSAKSDTKRYDLKKKLMKFEKVVYHHTQTGEKIEREIPRQFLKPWENFTVDAKHNLESIIVSFKQNLRVINKATNYYEKYVEKDGTKNKERVEQTGTNWAIRKPMHKDTVSGKVDLPWVKVPKGKILTATRKSLDTSFDLKSIGSITDTGIQKILKNYLAFKDGNPEMAFSPEGIDDLNKNIEKYNDGKPHQPINKVRVFELGSKFQVGQTGNKKDKYVEAAKGTNLFFAVYEDEKGKRSYETIPLNEVIERQKQGLSVVDLKDTNDFYLCPNDLVYIPSGDELENVNNVDFKDIKKDKNERIYKVVSFSGSQIFFVRQDIATFIVNKAELSTLNKMERAIDGSMIKENCIKLNIDRLGNISKA

SEQ ID NO: 186 - RNA, 20 nt, Chryseobacterium sp.
guugugaauugcuuucaaaa

SEQ ID NO: 187 - RNA, 76 nt, Chryseobacterium sp.
uuuugaaagcaauucacaauaaggauuauuccguugugaaaacauucaaggcggggcaacucgccuuuuuucguuu

SEQ ID NO: 188 - DNA, 6 bp, Artificial Sequence
  source: /note="Description of Artificial Sequence: Synthetic oligonucleotide"
  modified_base (1)..(2): a, c, t, g, unknown or other
nnraat

SEQ ID NO: 189 - protein, 1112 aa, Bacillus sp.
MAIRSIKLKMKTNSGTDSIYLRKALWRTHQLINEGIAYYMNLLTLYRQEAIGDKTKEAYQAELINIIRNQQRNNGSSEEHGSDQEILALLRQLYELIIPSSIGESGDANQLGNKFLYPLVDPNSQSGKGTSNAGRKPRWKRLKEEGNPDWELEKKKDEERKAKDPTVKIFDNLNKYGLLPLFPLFTNIQKDIEWLPLGKRQSVRKWDKDMFIQAIERLLSWESWNRRVADEYKQLKEKTESYYKEHLTGGEEWIEKIRKFEKERNMELEKNAFAPNDGYFITSRQIRGWDRVYEKWSKLPESASPEELWKVVAEQQNKMSEGFGDPKVFSFLANRENRDIWRGHSERIYHIAAYNGLQKKLSRTKEQATFTLPDAIEHPLWIRYESPGGTNLNLFKLEEKQKKNYYVTLSKIIWPSEEKWIEKENIEIPLAPSIQFNRQIKLKQHVKGKQEISFSDYSSRISLDGVLGGSRIQFNRKYIKNHKELLGEGDIGPVFFNLVVDVAPLQETRNGRLQSPIGKALKVISSDFSKVIDYKPKELMDWMNTGSASNSFGVASLLEGMRVMSIDMGQRTSASVSIFEVVKELPKDQEQKLFYSINDTELFAIHKRSFLLNLPGEVVTKNNKQQRQERRKKRQFVRSQIRMLANVLRLETKKTPDERKKAIHKLMEIVQSYDSWTASQKEVWEKELNLLTNMAAFNDEIWKESLVELHHRIEPYVGQIVSKWRKGLSEGRKNLAGISMWNIDELEDTRRLLISWSKRSRTPGEANRIETDEPFGSSLLQHIQNVKDDRLKQMANLIIMTALGFKYDKEEKDRYKRWKETYPACQIILFENLNRYLFNLDRSRRENSRLMKWAHRSIPRTVSMQGEMFGLQVGDVRSEYSSRFHAKTGAPGIRCHALTEEDLKAGSNTLKRLIEDGFINESELAYLKKGDIIPSQGGELFVTLSKRYKKDSDNNELTVIHADINAAQNLQKRFWQQNSEVYRVPCQLARMGEDKLYIPKSQTETIKKYFGKGSFVKNNTEQEVYKWEKSEKMKIKTDTTFDLQDLDGFEDISKTIELAQEQQKKYLTMFRDPSGYFFNNETWRPQKEYWSIVNNIIKSCLKKKILSNKVEL

SEQ ID NO: 190 - RNA, 36 nt, Bacillus sp.
gccugaauacuuagcagaaauaaugaugauuggcac

SEQ ID NO: 191 - RNA, 100 nt, Bacillus sp.
auaauaaaggugaccuauagggucaaugaaucugugcgugugccauaaguaauuaaaaauuacccaccacaggauuaucuuauuucugcuaaguguuuag

SEQ ID NO: 192 - DNA, 4 bp, Artificial Sequence
  source: /note="Description of Artificial Sequence: Synthetic oligonucleotide"
  modified_base (4)..(4): a, c, t, g, unknown or other
attn

SEQ ID NO: 193 - protein, 1108 aa, Brevibacillus sp.
MAIRSIKLKLKTRTGPEAQNLRKGIWRTHRLLNEGVAYYMKMLLLFRQESTGGQTKKELQEELVRHIREQQQKNRADKNTQALPLDKAFAALRQLYELLVPSSIGQSGDAQIISRKFLSPLVDPNSEGGKGTSKAGAKPTWQKKKEANDPTWEQDYEKWKKRREEDPTASVITTLEEYGIRPIFPLYTNTVADIAWLPLQSNQFVRTWDRDMLQQAIERLLSWESWNKRVQEEYSKLQEKMTQLNEQLEGGQEWISLLEQYEEQREQELIENMTAANDKYRITKRQMKGWNELYEQWSTVLPNASHEQYREALKRVQQRLRGRFGDAHFFQYLMKEEHHLIWKGNPQRIHYFVARNELKKRLEEAKQNATMTLPDARKHPLWVRFDARGGNLQDYYLTAEADNPRSRRFVTFSQLIWPNESGWMEKQDVEVELALSKQFYQQVTLQKNDKGKQEIEFKDKGSGSTFSGHLGGAKLQLERGDLEKEEKDFEGGEIGSVYLNIVIDFEPLQEVKNGRLQSPYGQVLQLVRRPNEFPKVTTYKSEELVEWMKASQNHSSGVESLESGFRVMSIDLGLRTAAATSIFSVEESNDANAAGFSYWIEGTPLVAVHKRSYMLKLPGEQVEKQVREKRDERQDQQRRVRFQIRILSQVIRMAKKQNRERADELDHLSQALEKQKSLLDQTDRTFWNGIVCDLTDALREKEGGWEQAVVQIHRKAEEHVGKVVQAWRKRFDADERKGIAGLSMWSIEELDSLRKLLISWSRRTRNPQEINRFEQGHTSHQRLLTHIQNVKEDRLKQLSHAIVMTALGYVYDEKKLEWFAKYPACQVILFENLSQYRSHMDRSTKENSTLMKWAHRSIPKYVHMQAEPYGIQIGDVRAEYSSRFHAKTGTPGIRCKMVKGQELQGKRFENLQKRLVSEQFLTEEQVKQLRPGDIVPDDSGEWFMTLSDGSEGKEVVFLQADINAAQNLQKRFWQRYNELFKVSCRVLIRGEEEYLIPKAKSVQAKLGKGLFVKKTDTVMKDVYVWDSQAKLKGKTTFTEESESPEQLEDFQEIIEEAEEAKGTYRTLFRDPSGVFFPEFVWNTQKDFWSEVKRRLYGKLRERFLMKTR

SEQ ID NO: 194 - RNA, 22 nt, Brevibacillus sp.
uggaaagcuucgagguuagcac

SEQ ID NO: 195 - RNA, 105 nt, Brevibacillus sp.
cgacgguuagaggccguaugucgauuugcuuuaauuucgugcgugugcauugucguccuccauuacagggcggcuaccacgaauagucacgaaguuccacugagu

SEQ ID NO: 196 - protein, 1071 aa, Bacillus sp.
MRELDYRIGLDIGTNSIGWGVIELSWNKDREQYEKTRIVDKGVRMFDKAEIPKTGASLAEPRRIARSSRRRLNRKSQRKKDIRNLLVQHEIISQKELTSLYPLSKSSMDIWDIRLDGLDRLLDRFEWARLLIHLAQRRGFKSNRKSELKDVETGKVLSSIQVNEKRLSLYRTVGEMWMKNADCSKYGKRRNSPNEYVFSVSRADLEKEIVTLFEAQRKFHSSYASVDLQKTYIQIWAHQLPFASGNAIVNKVGYCSLLKGKEKRVPKATYTFQYFNTLDQINRTRLGPNFQPFTKEQRDIILDKMFQRTDYYKKKTIPEVTYYDIRKWLALDETIQFKGLTYDPNEELKKIEMKPFINLKPFYEIKKVVTNYAKKTNEVFSALDYDTVAYALTVYKTDKDIRSYLKRSNNLSKRCYDDQLIEELLTLSYTKFGHLSFKAINHVLPIMQEGRTYQEAIHQLGYDTTNLKKENRSMFLPIIPDEITNPIVKRALTQARKVVNAIIRRYGSPNSVHIELARELSKSHDERKKIMTAHDENYKKNKGAISILIENGILNPTGYDIVRYKLWKEQGERCAYSLKKIPANTFFNELKKERSGPPVLEVDHILPYSQSFIDSYHNKVLVYGDENQKKGNRIPYTFFSEEDKEWESFESYVRSNSFFSKKKRGYLLKKAYLPRESNLIKERHLNDTRYASSYLKNFIEKNLKFKEAVGITRKKYVQTVNGVITAHLRKRWGLEKDRQETYLHHAMDAIIVACTDHHMVTKVTEYYQIKEGNKSIKKPYFPLPWMGFREEILSHLESQPIARKISEELKIGYQSSDYILVSRMPKRSVTGSAHDQTVMKKGGIDKKGKTIIIKRVHLKDIKFDENGDFKMVGKEQDLATYEAIKQRYLEYRKKSKKAFETPLYKPSKKGKGNLIKKIKVEVQTKSFVREINGGVAQNGDLVRVDLFEKDNRYYMVPIYVVDTVRSELPNKAVTSSKGYEQWLSIDNSFTFKFSLYPYDLVRLVKGDEDRFLYFSTLDINSDRLNFKDVNKPSKQAEYRYSLKTIENLEKYEIGVLGDLRLVRQETRKIFK

SEQ ID NO: 197 - RNA, 34 nt, Bacillus sp.
gucauaguuccauuaaagccauugcuguuuuaug

SEQ ID NO: 198 - RNA, 148 nt, Bacillus sp.
caugauacagcaauggcuuugauguuucuaugauaagggcuucggcccguggcguuggggaucgccugcccauuuuaaugggcuucuccccaucuauuuaaugagaaauuuacaaccuuggcuauucuuaaauagcuaagguuuuuuu

SEQ ID NO: 199 - DNA, 6 bp, Artificial Sequence
  source: /note="Description of Artificial Sequence: Synthetic oligonucleotide"
  modified_base (1)..(4): a, c, t, g, unknown or other
nnnncc

SEQ ID NO: 200 - protein, 1403 aa, Chryseobacterium sp.
MVERILGLDLGVSSIGWALVEEDVENPENNKIIKLGVRVNPLTIDEKTNFEKGKSITTNAGRTSARSARRNLQRFKLRRKSLWEVLINYKIIKNDTVLAEIGKNSTFQTQYLRAKAAKEKIELDELARVLFLINKKRGYKSSRKVQSDDEGKAIDGMSVAKELYEKNYTPGQYVYDLLKNGKKQIPDFYRSDLQNELDRVWEFQKQYHPDILTDEYKKELEGKGQRATAAIFLNRYKIYTADNKGTREEKRFQAYQWRVEALSQPLDIKEVAYVITEINNNLNNSSGYLGAISDRSKKLYFNGQTIGEYLYEELSLNPHARLKNQVFYRQDYQDEFEKIWETQAKFHSVLTTELKEDVRDIIIFYQRKLKSQKGLISFCEFESKEIVIEENGKKKRKKVGLKVVPKSSPLFQEFKIWQVLNNIEIKNEDGRRYLDQEEKELLFNELNCKGNLTSQKCLEFLGFKSKETKINFKVIEGNRTNEKLYDAFLKILELKGYNVFELLKIKEDRDEAKLSELKASADEIKRMVKEIFNANLINTSILDFNAELEGKDFENQASYQFWHLIYSYEGDNSPSGNEKLYELLENKFGFKKEHSKILSTIVFPQEYGSLSAKAMRRIYPYIKDNKYSEACLLAGYNHSKQSLTKEELENRKLKEQLEVLPKNSLRNPVVEKILNQMINLVNAIISEHGKLDGVRIELARELKKSAQEREDMTKSINEATILHQKYATVLRQEFGVVNPSRNDIIRYKLYMELAGNGYKDLYTNVKIEKENIFTDKYDIDHIIPQSRFFDDSFSNKVLVPRQANLDKGNLTGYDFMSNKGAEREEHFLNVIKDLLENGSISKAKYEKLKKKGIEIGDGFIERDLRDTQYIARKAKEILFEITNSVISTSGRITDKLREDWDLVNTMKELNLDKYRRLGLTEIVINSKGEEKEVIPDWTKRNDHRHHAMDALTVAFTTRNHIQYLNYLNARKDEKHKEHQNIYAIENIITEIIEKKNGSKSRRFKTPMNRFRHEAKQHLKEVLVSHKTKNKVVTSNINKTKKKRGIHKKAELTPRGQLHKETVYGSKKFLQSREEKVSAKFDYETILMVVNPIHRNALLNRLKEYGNDPKKAFSGKNAVNKTPVYLSDSKIEVLPEKVTLSWFETGYTIRKAVTPDNFKDYKNLEKITDMGIKKILKERLDQFKGNAKEAFSNLDKEPIWLNEEKGIAIKTVTITGVSNAESLHFKKDHLGKEILDENGNKIPVDFVSTGNNHHLAIYLNEEEKLDDKMVTFYEAVLRVNQGLPVIDKNYNREKGYKFLMTLKQNEMFVFPNEEFDPSEIDLLDEKNLEQISQNLFRVQKISKVGYGNSFIRDFVFRHHLETTVEDRKELRNTTYIQLKSLEGLRNIVKVRLNHLGKIVQIGEY

SEQ ID NO: 201 - RNA, 24 nt, Chryseobacterium sp.
guugugaaaugcuuucaaaacuua

SEQ ID NO: 202 - RNA, 78 nt, Chryseobacterium sp.
auaaauuuugaaagcacuucacaauaaggauuauuccguugugaaaacauucaaggcggggcaacucgccuuuuuuuu

SEQ ID NO: 203 - DNA, 6 bp, Artificial Sequence
  source: /note="Description of Artificial Sequence: Synthetic oligonucleotide"
  modified_base (1)..(1): a, c, t, g, unknown or other
nrrttt

SEQ ID NO: 204 - protein, 1404 aa, Sphingobacterium sp.
MMKRILGLDLGTSSIGWAYVLEAQDENEISQIKKLGVRVNPLTTDEQLNFEKGKPITTNAGRTLARSARRNLQRYKLRRENLIEVLKREKWIDDKSILAENGNKSTFETYALRAAAASKEIKLEELARVLLMINKKRGYKSSRKVNKEDDGQLVDGMEVAKKLYHENLTPGEFVYRLLKEGKKKIPDFYRSDLQRELDLIWDFQFKYYPDLLTQDLKEELKGKGLRATSAIFWSKYKFNTAENKGTREEKKIQAYQWRKDGLTKQLEQEEVAYIIAEINGQLANSSGYLGAISDRSKELYFNKQTVGQFLFNQLQHNTHARVKNQVFYRQDYLDEFEKIWSVQSQYHQGLTEQLKEEIRDIIIFYQRKLKSQKGLISFCEFEQHEVVINGKNKIVGLRVAPKSSPIFQEFKIWQQINNVKLRNKITKEVYNLAEEQKRSLFETLNLKGKLSAYQVLNLIEVKPKEWELNYTELEGNSTNLALYNAYLDILDIEGYDVRSELKIKLNKDEITLSDLDIPVSEIKGMIRRIFQHLGINTSILDFNAQMQGDDFEKQLSYQLWHLLYSYEEDNSKTGMERLYNQLNLKFGFSLDQAKIFGKIALQEDYGNLSTKAIRKIYPYIQDVEYSVACKQAGYNHSKSSLTKEQLTNRVLKDHLDILPKNSLRNPVVEKILNQMVNVVNTLIETENDKLIKEGKNADFRFDEIRIELARELKKNAKEREELTKAINTSKSEHEKIIKILQTEDGIKNPTRNDIIRFKLYQELKNNGYKNLYTNEYIQRKDLFTNVYDIDHIIPQSRLFDDSFSNKVLVPRNINIEKGNQTAFDYVHAKFGEDGIEAYEARVERLFNLKEEGVSRSKYKKLLMRGLDIGEGFIERDLRDSQYIAKKAKAMLFEIAPSVISTSGSVTDRLREDWGLVSVMKELNLPKFKAVGLTEYLETKDGNRKEVIKDWSKRNDHRHHAMDALTVAFTKHSHIHYLNHLNARKNEKSEFFSTIKAIEIKETYVERDDLGNRKRLFKEPIPHFRSIAKEHLESVLVSHKAKNKVVTKNRNKIDGKKQAQEVLTPRGQLHKESIYGKILQYASKEEKISAKFDAATIAMVSNPRYRSALLDRLSAYGNDPKKAFTGKNSPNKSPIYLDQEKQLAVPEKVKLVWLEEDYTIRKEIGPDLKIEKVIDQGVKRILEQRLTEYGGDSKKAFSDLDNNPIWLNKEKGIAIKRVTISGVKNAEALHIKKDHLGQVLKDKDGKPMPVDFVSTGNNHHVAIYEDDNGALQERIVPFYEAVARVNNGFPIIDKHYNQHLGWKFLFSMKQNEMFLFPSEEFDPKQINLLDRSNYRLISKNLFRVQKFGELSKSGFWFRHHLETSVDVNKSLRSISYFDFYSKDFMKNIAKVRINHLGEIIHVGEY

SEQ ID NO: 205 - RNA, 18 nt, Sphingobacterium sp.
guugugaauugcuuucau

SEQ ID NO: 206 - RNA, 72 nt, Sphingobacterium sp.
augaaagcaauucacaauaaggauuauuuccguuguguaaacauuuagcgccucgucuaucuacggggcauu

SEQ ID NO: 207 - DNA, 7 bp, Artificial Sequence
  source: /note="Description of Artificial Sequence: Synthetic oligonucleotide"
  modified_base (1)..(2): a, c, t, g, unknown or other
  modified_base (5)..(5): a, c, t, g, unknown or other
nnrrngg

SEQ ID NO: 208 - protein, 1453 aa, Chryseobacterium sp.
MMIKNILGLDLGTNSIGWALIKQDFENKYGEILGMGSRIIPMDQKVLGEFGSGNSVSQTADRTKYRGVRRLRERFLLRRERLHRVLNVLNFLPIHYASQIDFEKRFGKFREEIEPKLVYNNDGFIFKNSFEEMLSDFRKHQPQILENDKKIPYDWTIYYLRKKALTQKIEKEELAWILLNFNQKRGYYQLRGEDIEEEKDKTFVRLKVEKIVDSGDNVKGKILYDVYFDNGWKYDKQIVKTEDWIERVKEFIVTESFLKNGDIKRTYKAVDSEKDWIAIKTKTEQEIEKSHKTVGTYIYETILHNPKQKIKGKLVRTIERKFYKDELRQILEKQKEFHPELQNDDLYSDCVRELYRNNEAHQLTLSKKDFVHLFIEDIIFYQRPLRSQKSSISNCTLEYRRYKDKHGVEHIQYLKAIPKSNPYYQEFRIWQWMYNLNIYKRDDDTNVTKEFLNSTEDFENLFDFLNNRKEVEQKALLKHFKLNEKTHRWNFVENKKYPCNETKTMISSRLDKVENISENFLTSEIEHKIWHIIYSVNDKIEYEKALKSFANKNNLDEVSFFEAFKKFPPFKNEYGSFSEKAIKKLLPLMRVGKYWDEDEIVKNSDTYFKNIEDLLGNIARKEENISDDDRKKYNKTVNLKLREELEIFQDAEIASFQKLRLHIAQYLVYGRHSEASIIGKWNSADDLEEFLKEFKQHSLRNPIVEQVITETLRVVKDIWMKYGNGAKDFFNEIHIELGREMKLPAEDRKKLTSQISENENTNLRIKALLAEMMNDSSVENVRPFSPMQQEILKIYEDGVLNSGIEIEDEYLKISKTAQPSSSDLKRYKLWLEQKYKSPYTGQIIPLNKLFTPEYEIEHIIPKSRYFDDSFSNKIICESAVNKLKDNYIGLGFIKQFAGAIVELGFGKNVKVFEIEEYEDFVKKHYANNRGKRNKLLLEEIPEKMIERQLNDTRHISKYISSVLSNIVRVEDGTDEGVNSKNIVPGNGKITIQLKQDWGLNDVWNDLILPRFERMNQLTNSTDFTAWNKNHQKYLPTVPIEFSKGFSKKRIDHRHHALDALVIACTTKDHVNLLNNQSAKSDTKRYDLKKKLMKFEKVVYNHTQTGEKIERDIPKQFLKPWETFTIDAKNRLETIIVSFKQNLRVINKATNHYEKYVEKEGVKMKERVEQTGTNWAIRKSLHEETVSGKITLSWVETSKGEFITATRKPLDSSFTFEKINKITDTGIQKILNNYLEAKDNNPELAFSAEGIEDLNKNIEKYNDGKSHQPIIKIRLYEKGKGRFVLGQTGNKINKYVQGSPNLFFAIYKDENGKKIFESIRLDIVIERLKQGLQAIPETNQNGVSLYQSLSPLDLVYIPTEYELESPHILDFSKLNKTQITRLYNTNDFSGVTAYFSQNSFAKHIYPKEMDLSWNEKKQKLSGSFDSKTASYNNTSIKDIFIKVKVDRLGNISKA

SEQ ID NO: 209 - RNA, 29 nt, Chryseobacterium sp.
guugugaauugcuuucaaaaauuauuauc

SEQ ID NO: 210 - RNA, 83 nt, Chryseobacterium sp.
uaauaauuuugaaagcaauucacaauaaggauuauuccguugugaaaacauucaaggcggggcaacucgccuuuuuucguuuu

SEQ ID NO: 211 - DNA, 6 bp, Artificial Sequence
  source: /note="Description of Artificial Sequence: Synthetic oligonucleotide"
  modified_base (1)..(2): a, c, t, g, unknown or other
nnraar

SEQ ID NO: 212 - protein, 1093 aa, Brucella sp.
MKTLGIDLGTASIGWAILDEASIIASGVRIFSQSEMAGRDPQSKASLAVARRDARGARRRRDRYLKRRRRLLDLLTEHGLAPADEKSRKALVREYEDGKDGDLSNSVYALRARALDEALTPYEIGRAIFQLNQRRGFKSNRKTDSNDPEQGKIATAIHVLDAKMDEDKARTFGEWLHMRRLKGLSVRARMTADGDSYDFYPSRAALEREFDRLMASQKRFHPDLLNSSVIDDIRKVVFHQRPLKPVQPGKCSYNHRESRLPKAHPLFQKFRLLKEVNELEIVGEDQRYVKLTPAQRDVLTLALRTGLTKQGRLPFSKLRSILKLGKEVRFNKEKDNRTDLEGDVIHFRVSRPDCFGNRWAAMPVEEQAAVTEKLRTEPDYSALLDWLKNEAGLDEAHARAVADTPVPDGFGRMGPSALSALADAMEHEIDAQGFVITEAEAAKRVYGRTNSEADPGRKGVDQLPKYQEVLQRHIPPGTGEPDDPYDEYMGRITNPTVHIALNQLRRLVNALIRKYGKPNKIAIEVGRELKLNEKQRNEVNREIGQNTRAAMARGQQLVEIFKQPNTGYNRLRLELWEDLNREQPLKRLCTYCGKAIAAHMLFNGETDIDHILPYSKTLDDSKANRLLCCTPCNREKKNYAPANVLQWRDHYGEILARATALPKNKQWRFAEDAMTRYEAEGGFLARQLTDMQYISRLALTYLAHLYDYEEPDLDGVYKRHDRVRALPGRMTEMLRRQWALNELLHGHNLAGGDGAKEKNRLDHRHHAIDAIVIACTSQSLINRLSTAAGEAEERGAARVVERIDPPWPSFREDVREAVNAIVVSHKPDHGTASRSGYDKGRGQTAGKLHNDTAYGETGEKDHNGNNLVVRRIAISDIKRSADIMKIRTNAHGHSELRDRLYEATRDLEGKAFEQAVTAFVKHDAKFKGIRHVRVTEVQNPVWITHGGGKYKKGYLPGGNDRFDVWELPDGKWDAEVVTTFDAHRPDFTPRMRIEHHNARKIMSLKKGDMIAYDDPDSGKRVIAIVRKFDQRNKQLYLDPHNEAGNLDQREKEKTYKPLRPMPNPLKKYRPRQVRVDEIGQVFDPGPWWEKRSD

SEQ ID NO: 213 - RNA, 27 nt, Brucella sp.
guugcgguuggccugcgauuucugaac

SEQ ID NO: 214 - RNA, 81 nt, Brucella sp.
guucagaaaucgcaguccagccguuaacaagcugagauaugcaccaaauaaggcgcucgcuucggcgggcgcuuuuucguu

SEQ ID NO: 215 - DNA, 6 bp, Artificial Sequence
  source: /note="Description of Artificial Sequence: Synthetic oligonucleotide"
  modified_base (1)..(2): a, c, t, g, unknown or other
  modified_base (4)..(4): a, c, t, g, unknown or other
nnrnat

SEQ ID NO: 216 - protein, 1054 aa, Staphylococcus sp.
MKEKYILGLDLGITSVGYGIINFETKKIIDAGVRLFPEANVDNNEGRRSKRGSRRLKRRRIHRLERVKLLLTEYDLINKEQIPTSNNPYQIRVKGLSEILSKDELAIALLHLAKRRGIHNINVSSEDEDASNELSTKEQINRNNKLLKDKYVCEVQLQRLKEGQIRGEKNRFKTTDILKEIDQLLKVQKDYHNLDIDFINQYKEIVETRREYFEGPGQGSPFGWNGDLKKWYEMLMGHCTYFPQELRSVKYAYSADLFNALNDLNNLIIQRDNSEKLEYHEKYHIIENVFKQKKKPTLKQIAKEIGVNPEDIKGYRITKSGTPQFTEFKLYHDLKSIVFDKSILENEAILDQIAEILTIYQDEQSIKEELNKLPEILNEQDKAEIAKLIGYNGTHRLSLKCIHLINEELWQTSRNQMEIFNYLNIKPNKVDLSEQNKIPKDMVNDFILSPVVKRTFIQSINVINKVIEKYGIPEDIIIELARENNSDDRKKFINNLQKKNEATRKRINEIIGQTGNQNAKRIVEKIRLHDQQEGKCLYSLESIALMDLLNNPQNYEVDHIIPRSVAFDNSIHNKVLVKQIENSKKGNRTPYQYLNSSDAKLSYNQFKQHILNLSKSKDRISKKKKDYLLEERDINKFEVQKEFINRNLVDTRYATRELTSYLKAYFSANNMDVKVKTINGSFTNHLRKVWRFDKYRNHGYKHHAEDALIIANADFLFKENKKLQNANKILEKPTIENNTKKVTVEKEEDYNNVFETPKLVEDIKQYRDYKFSHRVDKKPNRQLINDTLYSTRMKDEHDYIVQTITDIYGKDNTNLKKQFNKNPEKFLMYQNDPKTFEKLSIIMKQYSDEKNPLAKYYEETGEYLTKYSKKNNGPIVKKIKLLGNKVGNHLDVTNKYENSTKKLVKLSIKNYRFDVYLTEKGYKFVTIAYLNVFKKDNYYYIPKDKYQELKEKKKIKDTDQFIASFYKNDLIKLNGDLYKIIGVNSDDRNIIELDYYDIKYKDYCEINNIKGEPRIKKTIGKKTESIEKFTTDVLGNLYLHSTEKAPQLIFKRGL

SEQ ID NO: 217 - RNA, 28 nt, Staphylococcus sp.
guuuuaguacucuguaauuuuagguaug

SEQ ID NO: 218 - RNA, 85 nt, Staphylococcus sp.
ucauaccuaaaauuacagaaucuacugaaacaagacuauaugucguguuuaucccacuaauuuauuagugggauuuuuuuguuuu

SEQ ID NO: 219 - DNA, 4 bp, Artificial Sequence
  source: /note="Description of Artificial Sequence: Synthetic oligonucleotide"
  modified_base (1)..(2): a, c, t, g, unknown or other
nngg

SEQ ID NO: 220 - protein, 1076 aa, Bacillus sp.
MSELDYRIGLDIGTNSIGWGVIELFWNKDRERYEKVRIVDKGVRMFDKAEIPKTGASLAEPRRIARSSRRRLNRKSQRKKEIRNLLVQHGVITQEELDLLYPLSKKSMDIWDIRLDGLDRLLNHLEWTRLLIHLAQRRGFKSNRKSELKDAETGKVLSSIQVNEKRLSLYRTVGEMWIKDAEFSKYDRRRNSPNEYVFSVSRADLEKEIVTLFEAQRKFQSSYSSKNLQETYLQIWAHQLPFASGNAILNKVGYCSLLKGKERRIPKATYTFQYFSALDQVNRTRLGPDFQPFTQEQKEIILDKMFQRTDYYKKKTIPEVSYYDIRKWLELDETIQFKGLNYDPNEELKKIEKKPFINLKAFYEIKKVVANYAERTNEAFSTLDYDAIAYALTVYKTDKDIRSYLKKSNNLSKRCYDDQLIEELFTLSYTKFGHLSFKAINRVLPIMQEGRTYQEAIQQLGYDTTNLKKENRSMFLPLIPDEITNPIVKRALTQARKVVNAIIRRYGSPNSVHIELARELSKSHDERKKIMTAHDENYKKNKGAISILIENGILNPTGYDIVRYKLWKEQGERCAYSLKEIPPDTFFNELKKERNGSSILEVDHILPYSQSFIDSYHNKVLVYSDENRNKGNRIPYTYFLETNKDWEAFERYVRSNKLFSKKKREYLLKKAYLPRESELIKERHLNDTRYASTFLKNFIEQNLQFKEVEVNLRKKRVQTVNGVITAHLRKRWGLEKNRQETYLHHAMDAIIVACTDHHMVTRITEYYQIKESNKSVKKPYFPMPWEGFRDELLSHLASQPIAKKISEELKAGYQSSDYIFVSRMPKRSVTGAAHNQMIRRKGGIDKKGKTIIIKRVRLKDIKFDENGDFKMVGKEQDLATYEAIKQRYLDHGKNLKKAFETPLYKPSKKGTGNLIKRVKIEGQTKAFVREVNGGVAQNSDLVRVDLFEKDDKYYMVPIYVPDTVCSELPKKVVKSGKGYEQWLTLDNSFTFKFSLYPYDLVRLVKGDEDRFLYFGTLDIDSDRLNFKDVNKPSKQNEYRYSLKTIEDLEKYEVGVLGDLRLVRKETRRNFHEIKIN

SEQ ID NO: 221 - RNA, 20 nt, Bacillus sp.
gucauaguuccauuaaagcc

SEQ ID NO: 222 - RNA, 84 nt, Bacillus sp.
ggcuuugauguuucuaugauaaggguuucggcccguggcgucggggaucgccugcccauuccgaugggcuucuccccauuuauu

SEQ ID NO: 223 - DNA, 6 bp, Artificial Sequence
  source: /note="Description of Artificial Sequence: Synthetic oligonucleotide"
  modified_base (1)..(4): a, c, t, g, unknown or other
nnnncc

SEQ ID NO: 224 - protein, 1108 aa, Brevibacillus sp.; identical to SEQ ID NO: 193

SEQ ID NO: 225 - RNA, 22 nt, Brevibacillus sp.
uggaaagcuucgagguuagcac

SEQ ID NO: 226 - RNA, 105 nt, Brevibacillus sp.; identical to SEQ ID NO: 195

SEQ ID NO: 227 - DNA, 4 bp, Artificial Sequence
  source: /note="Description of Artificial Sequence: Synthetic oligonucleotide"
  modified_base (4)..(4): a, c, t, g, unknown or other
dttn

SEQ ID NO: 228 - protein, 1150 aa, Enterococcus sp.
MYSIGLDLGISSVGWSVIDERTGNVIDLGIRLFSAKNSEKNLERRTNRGGRRLIRRKTNRLKDAKKILAAVGFYEDKSLKNSCPYQLRVKGLTEPLSKGEIYKVTLHILKKRGISYLDEDDTEAAKESQDYKEQVRENAQLLTKYTPGQIQLQRLKENNRVKTGINAQGNYQLNVFKVSAYANELATILKTQQAFYPNELTDDWIALFVQPGIAEEAGLIYRKRPYYHGPGNEANNSPYGRWSDFKKTGQPATNIFDKLIGKDFQGELRASGLSLSAQQYNLLNDLTNLKIDGEIPLSPEQKEYILAELMTKEFTRFGVNDVVKLLGVKKERLSGWRLDKKGKPEIHTLKGYRNWRKIFAESGIDLATLPTETIDCLAKVLTLNTEREGIENTLAFELSELAESVKLLVLDRYKELSQSVSTQAWHRFSLKTLHLLIPELMNATSEQNTLLEQFQLKSDVRKRYSEYKKLPTKDVLTEIYNPTVNKTVSQAFKVIDALLVKYGKEQIRYITIEMPRDDNEEDEKKRIKELHAKNSQRKNDSQSYFMQKSGWSQEKFQTTIQKNRRFLAKLLYYYEQDGICAYTGLSISPELLVSDSTEIDHIIPISISLDDSINNKVLVLSKANQVKGQQTPYDAWMDGSFKKINGKFSNWDDYQKWVESCHFSHKKENNLLETRNIFDSEQVEKFLARNLNDTRYASRLVLNTLQSFFANQETKVRVVNGSFTHTLRKKWGADLDKTRETHHHHAVDATLCAVTPFVKVSRYHYAVKEETGEKVMREIDFETGEIVDEMSYREFKKSKKYERKTYQVKWPNFREQLKPVNLHPRIKFSHQVDRKANRKLSDATIYSVREKTEVKTLKSGKQKITTDEYTIGKIKDIYTVDGWEAFKKKQDKLLMKDLDEKTYERLLSIAETTPDFQEVEEKNGKVKRVKRSPFAVYCEENDIPAIRKYAKKNNGPLIRSLKYYDGKLNKHINITKDSQGRPVEKTKNGRKVTLQSLKPYRYDIYQDLETKAYYTVQLYYSDLRFVEGKYGITEKEYMKKVAEQTKGQVVRFCFSLQKNDGLEIEWKDSQCYDVRFYNFQSANSINFKGLEQEMMPAENQFKQKPYNNGAINLNIAKYGKEGKKLRKFNTDILGKKHYLYYEKEPKNIIK

SEQ ID NO: 229 - RNA, 19 nt, Enterococcus sp.
guuuuuguacucucaauaa

SEQ ID NO: 230 - RNA, 73 nt, Enterococcus sp.
uuauugagaaucuacaaaaauaaggcauuuugccgaauuuaccgcccuacauauguagggcgguuuuuuuauu

SEQ ID NO: 231 - DNA, 5 bp, Artificial Sequence
  source: /note="Description of Artificial Sequence: Synthetic oligonucleotide"
  modified_base (1)..(4): a, c, t, g, unknown or other
nnnna

SEQ ID NO: 232 - protein, 1408 aa, Sphingobacterium sp.
MKRILGLDLGTSSIGWAYVLEAQDENEISKIEKLGVRVNPLTTDEQLNFEKGKPITTNAGRTLARSARRNLQRFKLRRNNLIEVLKREKWIDDKSILAENGNKSTFETYALRAAAASKEIKLEELARVLLMINKKRGYKSSRKVIKEDDGQLVDGMEVAKKLYHENLTPGEFVCRLLKEGKKKLPDFYRSDLQRELDLIWDFQFKYYPELLTRDFKEELKGKGLRATSAIFWSKYKFNTAENKGTKEEKKIQAYQWRKDGLTKQLAKEEVAYIIAEINGQLANSSGYLGAISDRSKELYFNKQTVGQFLFNQLQQNTHARLKNQVFYRQDYLDEFEKIWCIQSQFHQALTEQLKEEIRDIIIFYQRKLKSQKGLISFCEFEQHEVVVNGKNKVVGLRVAPKSSPIFQEFKIWQQLNNVKLRNNITKEVYNLAEEQKKLLFETLNLKGKLSAYQVLSLIEGKPKEWELNYTELEGNSTNSALYNAYLNILDIEGYDVRSELKIKLNKDEITLSDLDIPVSEIKDMIRRIFQHLGINTSILDFDAQMQGDDFEKQLSYQLWHLLYSYEEDDSKTGMDRLYNQLNLKFGFSLDQAKFIGKIALQDDYGNLSTKAIRQIYPYIQDAEYSAACKLAGYNHSKSSLTKEQLTNRVLKDHLDILPKNSLRNPVVEKILNQMVNVVNTLIDTENDKLIKEGKNADFRFDEIRIELARELKKNAKEREELTKAINTSKEQHEKIIKILQTEDGIKNPTRNDIIRFKLYQELKNNGYKNLYTNEYIQRKDLFTNIYDIDHIVPQSRLFDDSFSNKVLVPRNINIEKGNQTAFDYVRTKFGEDGIEAYEARVERLFNLKEEGVSRSKYKKLLMRGSDIGEGFIERDLRDSQYIAKKAKAMLFEITPSVISTSGSVTDRLREDWGLVSVMKELNLPKFKAVGLTEYLETKDGNRKEVIKDWSKRNDHRHHAMDALTVAFTKHSHIQYLNHLNARKNEKSEFFSSIKAIEIKETYVERDDLGNRKRLFKEPIAHFRTIVKEHLERVLVSHKAKNKVVTKNRNKIDGKKEAQEVLTPRGQLHKETIYGKILQYASKEEKISAKFDAATIAMVSNPRYRSALLDRLIEYGNDPKKAFTGKNSPSKSPIYLDQQRQLAVPEKVKLVWLEADYTIRKEIGPDLKIEKVIDQGVKRILKQRLSVYDGDTKKAFSDLDNNPIWLNEEKGIAIKRVTISGVKNAEALHTKKDHLGQVLEDKDGNTMPVDFVSTGNNHHVAIYEDSEGNLYDRVVSFYEAVERINQNLPIVDRHYKQEEGWKFLFSMKQNELFVFPSINFDPKEIDLLDKKNYKEVSKHLFRMQKFSKVEYGNSAVRDYVFRHHLETSIIDTKELRDIAYKVFKSIGEFKSFVKIRTNHLGEIVHLGEY

SEQ ID NO: 233 - RNA, 16 nt, Sphingobacterium sp.
guugugaauugcuuuc

SEQ ID NO: 234 - RNA, 72 nt, Sphingobacterium sp.
gaaagcaauucacaauaaggauuauuuccguuguguaaacauuuagcgccucgucuaucuacggggcauuuu

SEQ ID NO: 235 - protein, 1429 aa, Chryseobacterium sp.
MMIKHILGLDLGTNSIGWALIKQNFENKYGEILGMGSRIIPMSQDILGEFGKGNSVSQTAARTDYRGIRRLRERFLLRRERLHRILNVLNFLPEHYASQIDFDKRFGKFKVETEPKLAWKNSDGKFSFLFQTSFNEMLEDFKAHGQDLKVPYDWTIYYLRKKALSQKIEKEELAWILLNFNQKRGYYQLRGEEEEENPNKLIEFYSLKIIDVLADEPQKGKSDIWYSLVLENGWIYRRSSKTSLLDWKDKIRDFIVTTDLNDNGSVKTDKEGNEKRSFRAPGENDWTLVKTKTEQEIDRSRKTVGTYIYETLLQNPKQKIKGKLVRTIERKFYKEELKQILEKQKEFHYELQSDDLYDDCIRELYRNNEAHQLTLSKKDFVHLFMEDIIFYQRPLKSQKSSISNCTLEFRKYKDENGVEHTQFLKAIPKSNPYYQEFRIWQWIFNLNIYKKDNDDNVTKEFLSTTEDFENLFEFLNNRKEIDQKALLKHFKLNEKTHRWKYVEDKKYPCNETKTMISERLKKVENISDDFLTRGMEQKIWHIIYSVNDKTEYEKALKSFAEKNNLDENSFFEAFRKFPPFKSEYGSFSEKAIKKLLPLMRLGKYWSYANIDLYSKNRIQKIITGEFDENIKDRVREKAIHLTAENDFQGLQLWLAQYIVYGRHSEATMIGKWNSADDLEEFLKEFKQHSLRNPIVEQVITETLRVVKDIWLKYGNGAKDFFNEVHIELGREMKQTKDERANATKTITENENTNLRIKALLAEMMNDHSVENVRPYSPMQQEILKIYEDGILKSDIEIDDDILKISKTAQPSSSDLKRYKLWLEQKYKSPYTGQIIPLNKLFTPEYEIEHIIPQSRYFDDSLSNKIICESAVNKLKDNYIGLGFIKQFGGTIIECGFGKRVKVFKAEEYEEFVKKHYANNRGKRNKLLLEDIPEKMIERQMNDTRHISKYISGILSHIVRVEDGTDEGVNSKNVIPGNGKITTQLRQDWGLNDVWNELVLPRFERMNQLTNSTDFTSWNENHQKYLPTVPVEFSKGFSKKRIDHRHHALDALVIACATKDHVNLLNNQSAKSDTKRYDLKKKLMKFEKTVYKDPQTEKRIEREVPKYFLKPWETFTVDAKNKLETIIVSFKQNLRVINKATNYYEKYVDKDGVKTKERVEQTGTNWAIRKPMHKETVSGKIDLPWVKVPKGKILTATRKSLDTSFDLKAIASITDTGIQKILKNYLEFKESPELAFSPEGIEDMNKNIKKYNGGKPHQPISKVRVFELGSKFQVGQTGNKKDKYVEAAKGTNLFFAIYEDRKGKRSYETIPLNEVIERQKQGLSVVDLKNINDFFLCPNDLVYIPSGDELENGGSIEIKNITKEKSERFYKVVSFSGSQIFFVRHDIAVSIVNKGEFSTLNKMERAIDGSMVKESCIKLKIDRLGNVLKA

SEQ ID NO: 236 - RNA, 19 nt, Chryseobacterium sp.
guugugaauugcuuucaaa

SEQ ID NO: 237 - RNA, 75 nt, Chryseobacterium sp.
uuugaaaagcaauucacaauaaggauuauuccguugugaaaacauucaaggcggggcaacucgccuuuuuucguu

SEQ ID NO: 238 - DNA, 6 bp, Artificial Sequence
  source: /note="Description of Artificial Sequence: Synthetic oligonucleotide"
  modified_base (1)..(2): a, c, t, g, unknown or other
nnraat

SEQ ID NO: 239 - protein, 1440 aa, Chryseobacterium sp.
MKNILGLDLGTNSIGWALVKQDFKNKQGEILGMGTRIIPMSQDILGDFGKGNSVSQTAERTKYRSARRLRERFLLRRERLHRVLNILNFLPEHYASQIDFEKRFGKFKVETEPKLAWKNIEGQFSFLFQNSFNEMLEDFKANAQDLRIPYDWTIYYLRKKALSQKIEKEELVWILLNFNQKRGYYQLRGEEEEENPNKLVELYSLKVVDVFVDEPQKGKSDIWYSLVLENGWIYRRASKISLFDWKDKIRDFIVTTDLNDDGSVKTDKDGNEKRSFRAPGENDWTLVKKKTEQEIEQSHKTVGMYIYETLRANPKQKIKGKLVRTIERKFYKEELRQILEKQKEFHQELQNDDLYNDCIRELYRNNEAHQLTLSKKDFVHLFIEDIVFYQRPLRSQKSSISNCTLEFRKYKDENGAEHTQYLKAIPKSNPYYQEFRLWQWIFNLNLYKKDNDENVIKEFLTTTQDVENLFEFLNNRKEIDQKALLKHFKLSEKTHRWNFVEDKKYPCNETKTMIATRLEKVENISDDFLTREIEQKIWHIIYSVNDKIEYEKALKSFALKHNLDENSFFEAFRKFPPFKSEYGSFSEKAIKKLLPLMRLGKYWDYANIDQFSKGRIQKIINGEYDENIKDRVREKAVHLTSENDFQGLQLWLAQYIVYGRHSEASIAGKWNSADDLEEFLKDFKHHSLRNPIVEQVITETLRVVKDIWLKYGKGAKDFFNEIHIELGREMKLPADDRKKLTNQITENENTNLRIKALLAEMMNDHGVENVRPFSPQQQEILKIYEDGVLNSDIEIEDEYLKISKTAQPSPSDLKRYKLWLEQKYKSPYTGQIIPLNKLFTPEYEIEHIIPQSRYFDDSFSNKIICESAVNKLKDNYIGLGFIKQFGGTIIELGFGKSVKVFDIDEYEDFVKKHYANNRSKRNKLLLEDIPEKMIERQINDTRYISKYISGILSNIVRLEDGSDEGINSKNIVPGNGKITTQLKKDWGLNDVWNDLILPRFKRMNQLTNSTDFIAWNENFQKFLPTVPIEYSKGFSKKRIDHRHHALDALVIACATKDHVNLLNNQSAKSETKRYDLKKKLMKFERVVYLHTQTGEKIEREVPKHFLKPWENFTVDVKHNLDTVIVSFKQNLRVINKATNYYEKYAENGGARNKARVEQKGINWAIRKPMHKDTVSGKVDLPWVKVPKGKILTATRKSLDTSFDLKSIGSITDTGIQKILKNYLMLKDGNPELAFSPEGIEDLNKSIEKYNDGKPHQPINKVRVFELGSKFQIGQAGNKKDKYVEAAKGTNLFFAVYEDKNGKRSYETIPLNEVIERQKQGLPVVDLRSTNDFYLCPNDLVYILSDDERGNMTNNDFENLSDEQVKRIYKFVSCTGGEGHFIPYANATEIIKNENGTNSKSERMQNFYDGSCMLDKNSKPIMIKENCVKLKVDRLGNISKI

SEQ ID NO: 240 - RNA, 20 nt, Chryseobacterium sp.
guugugaauugcuuucaaaa

SEQ ID NO: 241 - RNA, 79 nt, Chryseobacterium sp.
uuuugaaagcaauucacaauaaggauuauuccguugugaaaacauuuagagccucgacuaccuucggggcauuuuuauu

SEQ ID NO: 242 - DNA, 6 bp, Artificial Sequence
  source: /note="Description of Artificial Sequence: Synthetic oligonucleotide"
  modified_base (1)..(2): a, c, t, g, unknown or other
  modified_base (5)..(5): a, c, t, g, unknown or other
nnrrng

SEQ ID NO: 243 - protein, 1071 aa, Bacillus sp.
MRELDYRIGLDIGTNSIGWGVIELSWNKDREQYEKTRIVDKGVRMFDKAEIPKTGASLAEPRRIARSSRRRLNRKSQRKKDIRNLLVQHEIISQKELTSLYPLSKSSMDIWDIRLDGLDRLLDRFEWARLLIHLAQRRGFKSNRKSELKDVETGKVLSSIQVNEKRLSLYRTVGEMWMKNADFSKYGKRRNSPNEYVFSVSRADLEKEIVTLFEAQRKFHSSYASVDLQKTYIQIWAHQLPFASGNAIVNKVGYCSLLKGKEKRVPKATYTFQYFNTLDQINRTRLGPNFQPFTKEQRDIILDKMFQRTDYYKKKTIPEVTYYDIRKWLALDETIQFKGLTYDPNEELKKIEMKPFINLKPFYEIKKVVTNYAKKTNEVFSALDYDTVAYALTVYKTDKDIRSYLKRSNNLSKRCYDDQLIEELLTLSYTKFGHLSFKAINHVLPIMQEGRTYQEAIHQLGYDTTNLKKENRSMFLPIIPDEITNPIVKRALTQARKVVNAIIRRYGSPNSVHIELARELSKSHDERKKIMTAHDENYKKNKGAISILIENGILNPTGYDIVRYKLWKEQGERCAYSLKKISANTFFNELKKERSGPPVLEVDHILPYSQSFIDSYHNKVLVYGDENQKKGNRIPYTFFSEEDKEWESFESYVRSNSFFSKKKRGYLLKKAYLPRESNLIKERHLNDTRYASSYLKNFIEKNLKFKEAVGITRKKYVQTVNGVITAHLRKRWGLEKDRQETYLHHAMDAIIVACTDHHMVTKVTEYYQIKEGNKSIKKPYFPLPWMGFREEILSHLESQPIARKISEELKIGYQSSDYILVSRMPKRSVTGSAHDQTVMKKGGIDKKGKTIIIKRVHLKDIKFDENGDFKMVGKEQDLATYEAIKQRYLEYRKESKKAFETPLYKPSKKGKGNLIKKIKVEVQTKSFVREINGGVAQNGDLVRVDLFEKDNRYYMVPIYVVDTVRSELPNKAVTSSKGYEQWLSIDNSFTFKFSLYPYDLVRLVKGDEDRFLYFSTLDINSDRLNFKDVNKPSKQAEYRYSLKTIENLEKYEIGVLGDLRLVRQETRKIFK

SEQ ID NO: 244 - RNA, 24 nt, Bacillus sp.
gucauaguuccauuaaagccauug

SEQ ID NO: 245 - RNA, 138 nt, Bacillus sp.
caauggcuuugauguuucuaugauaagggcuucggcccguggcguuggggaucgccugcccauuuuaaugggcuucuccccaucuauuuaaugagaauuuuacaaccuuggcuauucuuaaauagcuaagguuuuuuu

SEQ ID NO: 246 - protein, 1091 aa, Rhizobium sp.
MDIETLFAFDIGTNSIGFCVFALDENGEPYRIIDIGTRIYADGRDPQSKASLAVARREARAMSRRRDRYVNRRKAVLRTLTEYGLMPAEASARQALIAETSDRNGAAGEASANPYALRAMALDEKLPLYWIGRVLFHLNQRRGFKSNRKTDRKDNEKGVIALGIGELRAAMHKTKARTYGEWLAARREDGHVTRLRAGSDAFEGDGYAFYPERSLLEAEFREIWARQSSFYPDVLTEARGDHLFQVMFYQRPLKKPRVGKCAFNPLEERLAKAHPLFQEFRLYKEVNELELVLPDHSHKKLDIEQRNALVILLRANREVTFKKLRTALKLAPDIVFNKESESREKLRGDEVHSVLADKKRFGPQWGALSRERQWQIIQTLKDEENPEKLFGWLKEEFGFEGEKADAIANAPLPEGYGRLGETALSSMLDEMKAAVIPEAEAAKNCGYDHSKLGEDREEGEAFLPPYQEILSRQIPPGTNDPADIYDIRMGRFTNPTVHIGLNQLRRVVNALIARHGKPQFVSLELARDLQLSEKQKAEANRAIAKNTREAAARSKKLGEMGQLDTGYNRLLLKLWEELNPSKPEDRVCIYSGKPIGIDMLFSAEVDVDHILPWSKTLDDSQANKLLCLKSANRQKRNRAPADVPEWRDRYEEILARAARLAPNKRRRFAPNAMAEFEAEGGFLARQLTDTQYLSRMAREYLSCLFPSAEIDRRGERKKKIRVIVSPGRLTEMLRRNWGLNNILPDHNLGEMTQAKNRKDHRHHAIDAAVVGVTTRSLLQRIATAAGRLDEADFENLVRKMVSENPPWPTFREELQAAVNGIVVSHKPDHGTVSRKGYAEGKGRTAGRLHNDTAYGFGTDASGNPVAVRRKLFTSLEAKDIPMIRDPELQAELYAAIDGLDDRRALQDALLSFRRTHPKFKGIRRVRMAETLSFIPIRDSQGNVYKGYKGDANYRYDVWETLDGKWHADVVTMFNAHQPDWRSPVHQEHPTARRVLRLQQNDMVAYEHPNDGYTIARVVKFNTAGIVYFASHRESGSLKARDADKQDPFKYFSKSAAGLKDIQCRQIRIDAAGRVFDPGPQDRASKSTRKTN

SEQ ID NO: 247 - RNA, 29 nt, Rhizobium sp.
guugcggcuggaccgcguuuucugaucug

SEQ ID NO: 248 - RNA, 78 nt, Rhizobium sp.
cagaucagaaaacgcggucuggccguuaacaagcuagaagcaccaaauaaggccguuccuucgggagcggcuuuuucu

SEQ ID NO: 249 - DNA, 3 bp, Artificial Sequence
  source: /note="Description of Artificial Sequence: Synthetic oligonucleotide"
  modified_base (1)..(1): a, c, t, g, unknown or other
ngg

SEQ ID NO: 250 - protein, 1401 aa, Myroides sp.
MKRILGIDLGTTSIGWAYVHEAENENEISSIEKLGVRVNPLTVDEQINFEKGKPITTNATRTLFRSARRNLQRFKLRRKHLIEILKHNNWISKQTLLTENGNHTTFETISLRDKAATQKVTLEELARVLLMINKKRGYKSSRKVNNTEEGQLIDGMEVAKKLYHEQLTPGQLSLQLIKQGVKRLPDYYRSDLNHELDLIWAFQQKFYPHILTSEFKELLKGKGLRATSNQFWTNYNFNTADNKGTREEKKLQNYQWRSDALIKQLDKEIVAYVISEINGQINNSSGYLGAISDRSKELYFNQLTVGQYLHRQLIANPHTRLKSQVFYRQDYLDEFEKIWETQSKFYPKELTTVLKNEIRDTVIFYQRKLKSQKGLISFCEFEQEQKIINGKTKTIGHRVIPKSSPLFQEFKIWQQLHNVVLRNKKTNVITPLAEEQKSHLFEELNLKGKLSSTQILKLIEDKPKDWELNYSELEGNNTNKALYNAYLDILDLEGYDIRDELKIKLNKDDIELSDLDVNASEIKEMIFSIFKHLGINTEILEFDATLKDKAFEKQASYQLWHLLYSYEEDNSPTGLDRLHNLLQKKFNFTLDQAKLVGNVLFQDDYGNLSSKAIKNIFPYITDNNYSTACELAGYKHSKHSLTKEENEKRELKSRLTILTKNSLRNPVVEKILNQMINVINTLIESENDKLVAQGKEPNFQFDEIRIELARELKKNAKEREELTKSMTQGKTNHEKIIKILQKEDGIKNPTRNDITRFKLYSELKNNGYKDLYTNEYIERKDIFSKEYDIEHIIPQSKLFDDSFSNKTLVRRNVNLKKGNQTAYDFILSEYGQEKANEFETRITNLYSLGKDEGISKSKYKKLLMQESEIGKGFIERDLRETQYIAKKAKSLLLEITRNVVSTSGGITDRLREDWGLVNVMKELNLKKFRDAGLTEFVEMKDGNKKEVIIDWTKRNDHRHHAMDALTIAFTKHNHIQYLNHLNARKNTKDELHTNIIAIEKKETTIITDERGNKKRIFKEPIPNFRNIAKSHLEAILVSHKAKNKVVTKNINKISGKKIGQQTLTPRGQLHKETVYGKIRQYVSKEEKVGPKFTKEVIELVSNPTYRDLLLKRLQENNNDPKKAFGGKNALSKSPIYINLEKNIIVPEVVKLVWLEDDYTIRKEISPELKIDKVVDEGVKRILQNRLALYNGDAKIAFSDLDNNPIWLSKDKGITIKRVTLSGVKNATALHTKKDHLGQPILDHKGQEIPVDFISTGNNHHVAIYEDKNGKLQESVVSHFEAVERVNQQLPIIDKTFNQHLGWKFLFTMKQNELFLFPSDDFNPNEIDLFDTRNYAVISKHLFRAQKLSTKDYSFRHHLETNVEDIKDLKTITWRREGLNGIQNIVKIRTNHLGEIVHIGEY

SEQ ID NO: 251 - RNA, 21 nt, Myroides sp.
guugugaauugcuuucaaaca

SEQ ID NO: 252 - RNA, 105 nt, Myroides sp.
ugaaagcaauucacaauaaggauuauuccguugugaaaacaucuaguccucgacuaauuucggggaauaaagccuuaacucuguuaaggcuuuuuuuaguuuuuu

SEQ ID NO: 253 - DNA, 5 bp, Artificial Sequence
  source: /note="Description of Artificial Sequence: Synthetic oligonucleotide"
  modified_base (1)..(4): a, c, t, g, unknown or other
nnnnc

SEQ ID NO: 254 - protein, 1432 aa, Chryseobacterium sp.
MAKNILGLDLGTNSIGWALINQDFENKQGKILGMGSRIIPMSQDILGDFGKGNSVSQTAARTGYRGVRRLRERFLLRRERLHRVLNIINFLPEHYASQIDFEKRFGKFKEETEPKLAYNKDGFVFKDSFEEMLADFKNYQPQLLENDKKIPYDWTIYYLRKKALSQKIEKEELAWILLNFNQKRGYYQLRGEDFEEEKDKMFVRLKVEKIIDSGDNVKGKILYDVYFENGWKYDKQIVKTEDWIERVKEFIVTESFLKNGDIKRTFKAVDSEKDWIAIKTKTEQEIDKSHKTVGVYIYETLLQNPKQKIKGKLVRTIERKFYKDELKQILEKQKEFHQELKNDDLYNDCVRELYRNNEAHQLTLSKKEFVHLLMEDIIFYQRPLRSQKSSISNCSLEFRKYKDENGVEHIQYLKAVPKSNPYYQEFRIWQWIFNLNIYKRDDEQNPVTTEFLNTTTDIENLFEFLNNRKEVDQKALLKHFKLNEKTHRWKYVEDKKYPCNETKSMISERLKKVENIANDFLTREIEQKIWHIIYSVNDKIEYEKALKSFAKKNNLDENSFFEAFKKFPPFKSEYGSFSEKAIKKLLPLMRLGKYWNCENISDDSKERIQKIINGEYDENIKDRVREKAIHLTSENNFQGLQLWLAQYVVYDRHSEASMIGKWNSADDLEEFLKEFKQHSLRNPIVEQVITETLRVVKDIWLKYGNGAKDFFNEIHIELGREMKQTKDERLDATKRITENENTNLRIKALLAEMMNDNSVENVRPYSPMQQEILKIYEDGVLNSGIEIEDEYLKISKTAQPSPSDLKRYKLWLEQRYKSPYTGQIIPLNKLFTPEYEIEHIIPQSRYFDDSFSNKIICESAVNKLKDNYIGLGFIKQFGGTIVECGLGKNVKVFEVNEYEDFVKKHYANNRGKRNKLLLEEIPEKMIERQLNDTRHISKYISGVLSNIVRVEDGSDEGVNSKNIVPGNGKITTQLKQDWGLNDVWNDLILPRFERMNQLTNSTDFTAWNENHQKFLPTVPIEFSKGFSKKRIDHRHHALDALVIACATKDHINLLNNQSAKSDTKRYDLKKKLMKFEKGVYNHPQTGERIQRDVPKQFLKPWESFTIDAKNNLDKIIISFKQNLRVINKATNYYEKYVEKNGIKTKERVEQTGTNWAIRKPMHKETVSGIVNLPWVKVPKGKILTATRKSLDTTFDLKSINSITDTGIQKILRNYLEFKGSPELAFSPEGIEDMNKNIEKYNDGKLHQPINKVRVFELGSKFQVGQTGNKKDKYVEAAKGTNLFFAVYEDKNGKRNYETIPLNIVIERQKQGLLACPESNEKGEKLLFQLSPNDFVYLTTEEENDNATPINFSLLSKEQINNLYKIVSFTGNRLYGIPICVATTIVNKAEYTQLNKIEFTKEKDLLLKLNVNRLGDVKTFTANDIRKIFNRQE

SEQ ID NO: 255 - RNA, 16 nt, Chryseobacterium sp.
guugugaauugcuuuc

SEQ ID NO: 256 - RNA, 73 nt, Chryseobacterium sp.
gaaagcaauucacaauaaggauuauuccguugugaaaacauuuagcgccucgacuaucuucggggcauuuuuu

SEQ ID NO: 257 - DNA, 6 bp, Artificial Sequence
  source: /note="Description of Artificial Sequence: Synthetic oligonucleotide"
  modified_base (1)..(5): a, c, t, g, unknown or other
nnnnnc

SEQ ID NO: 258 - protein, 1092 aa, Bacillus sp.
MRYSIGLDIGTTSIGNAVINKDLQRFEHLGVRIFDAAENPKDGSSLSAPRRLARSSRRRLRRRKHRVERTKQLLINKGLLTKTQVKNLYNSKNINLDIWDIRVSGIDRKLFNNEFARVLIHFSKNRGFKSNRKSELKEDDNGAILSAVKENRELMDEKGYRTIAEMLVSDEKYEGTKRNKGGDYSHVVARSDIENEICLLFQKQREYGHPFATEENEEAFLSIWSSQRPFSTKDDIVKKIGNCTLEPKEKRAPKSTYTFERFRALDKLNRLRILSTTAPSRPLTNEERKSILSSLFSKKEVKYKELRKLLKLTDDQRFNEIYYSPDETIEKTENRTFLSLESQYKIKKIIEKTESKNMQSSYHPIDYDTIGYALTVFKDDKDIQHYLQNSYIDSKGKAIPNMANREYNLELIEELLGLSFAKFGHLSLKALNNILPYMEEGEPYHIACEMASYQFSQRLSKEKHRLLPPIPVDEIPNPVVVRALTQVRKVLNSIIKKYGPPSDIYIELAREMSKPFKERKSLEREFNENRQINEKAKAHISELYRIPNDPRPHDILKFKLWNEQNGICPYSLKPISIEYLFNIGYAEVDHIIPYSRSFDDSNGNKVLVLTRENQNKLNRTPYEWFGHEENRWEDFVSFIRTMKVGKKKKNMLLKKNFDEEQEEQILSRNLNDTRYITRYIKSFIEDNLEFRTEENKEQYVHTVNGAYTSLMRKRWGLNKDRRGNDLHHAVDAAIIAVSLPFKNKVNAYFKRQETGLSKLLNNKKDIFPEPWRNFIKELEARMIQDPEKMKRALESLELETYGEIFLNKLKPIFVSRMPKHSIKGQIHEETIRRVRGFTEEGFLVTVKKTRLDQIPFDKNGDFPMYGKETDIKTYMAIKQRYLEYGQDKQKAFAVPLRKPSKNPKNAPIVRSVKIEGKANRVVMLDDKAAADNASIVRTEVFRHKKTGEYYLTPVYVADILSNKIPDRLITIKKSYSDWDRITDEHEYLFSLYNNDLVKIILPKEKETKKYTGGNHLWQEGFFYFKGVDSSNAGIKIINHLNSFEARIGTKRLIAFEKYQVNPLGEINKVHGEKRPGELLNKEEIKENRKNIS

SEQ ID NO: 259 - RNA, 23 nt, Bacillus sp.
gccauaauuccucuguaaaacuu

SEQ ID NO: 260 - RNA, 112 nt, Bacillus sp.
aagguuuauagaguuauuaugguaaggcaauaugccguggcguuggggaucgccuauguccgguuuuaccggaucucccuaaaggugacuaacuuugguuagucaccuuuuu

SEQ ID NO: 261 - protein, 506 aa, Bacillus sp.
MSTPLQQPHQKSKKTSQMITTRKFKLAIVSDNRNEAYSFIRNEIRNQNKALNAAYNHLYFEHIATEKLKHSDEEYQKHLTKYREVATNKYQDYLKVKEKVNASKDDEKLQKRVDKAREAYNKAQEKVYKIEKEFNKKSMETYQKVVGLSKQTRIGKLLKSQFTLHYDTEDRITSTVLSHFNNDMKTGVLRGDRSLRTYKNSHPLLVRARSMKVYEENGDYFIKWVKGIVFKIVISAGSKQKANIGELKSVLINILNGHYKVCDSSISLNKDLILNLSLNIPVSKENVFVPGRVVGVDLGLKIPAYVSLNDNPYIKKGIGNIDDFLNVRTQLQNQRKRLQKTLECTSGGKGRSKKLKGLDRLKAKEKNFVNTYNHFLSKKIIQFAVKNNAGVIHLEELQFDKLKHKSLLRNWSYYQLQTMIEYKAEREGIEVKYVDASYTSQTCSKCGHYEEGQRVLQDTFTCKNKECKGYVHKVNADFNASQNIAKSTDIIRCTEMAKNNDIEKNA

SEQ ID NO: 262 - RNA, 11 nt, Bacillus sp.
aggauugaaau

SEQ ID NO: 263 - RNA, 201 nt, Bacillus sp.
aaacagcuagaauguaacuuaaaguaggucaauguuuaaauucgauguugcaauuuguuuggacaaguggauuaaaacguuccuugaaaaucauauaaagcagccaguuuacgggcuugggcgaauuugcguccaaagggugaggccagguguaaguaagaaccuacaaaagcacucaccaaagggucaacucgauacauu

SEQ ID NO: 264 - protein, 506 aa, Bacillus sp.
MSTPLQQPHQKSKKTSQMITTRKFKLAIVSDNRNEAYSFIRNEIRNQNKALNAAYNHLYFEHIATEKLKHSDEEYQKHLTKYREVATNKYQDYLKVKEKVNDSKDDEKLQKRVDKAREAYNKAQEKVYKIEKEFNKKSMETYQKVVGLSKQTRIGKLLKSQFTLHYDTEDRITSTVISHFNNDMKTGVLRGDRSLRTYKNSHPLLVRARSMKVYEENGDYFIKWVKGIVFKIVISAGSKQKANIGELKSVLINILNGHYKVCDSSISLNKDLILNLSLNIPVSKENVFVPGRVVGVDLGLKIPAYVSLNDTPYIKKGIGNIDDFLKVRTQLQSQRKRLQKTLECTSGGKGRNKKLKGLDRLKAKEKNFVNTYNHFLSKKIIQFAVKNNAGVIHLEELQFDKLKHKSLLRNWSYYQLQTMIEYKAEREGIEVKYVDASYTSQTCSKCGHYEEGQRVLQDTFTCKNKECKGYVHKVNADFNASQNIAKSTDIIRCTEMAKNNDIEKNA

SEQ ID NO: 265 - RNA, 11 nt, Bacillus sp.
aggauugaaau

SEQ ID NO: 266 - RNA, 201 nt, Bacillus sp.; identical to SEQ ID NO: 263

SEQ ID NO: 267 - protein, 1735 aa, Pedobacter sp.
MTKNILGLDLGTNSIGWALIKIDHENKTLKIIALGSRIIPMDGQEFSKFNAGQKIESAAGNRTALHRARITKERYLLRRDRLHLVLNLLEALPNHYKIEVDFERNDKRCGQFKEGKEPKMAYLPTKNLENKFDFYFEEAFNEMIEDLQKVNPEIKNEKKKRVPKDWTIYFLRNKAMSQKVSLEELAWVLLSYNQKRGTDSEEIENEDEKSEIKEQIDLKVIKAEKKVDVNGAFFEITLNDAENFKYKEYTTKQLTFEDDVKEVTKILKLDEAGNIINEKTAYQISDLYNLTLANIEHTDINDKKAKHKYDFIYTNGWCTEKKKENFDVTYQKLEKQIKEESKVITELFVVSNKYDFAGKPESIIPSIKLPDFNSEGSKDWTLLKKKTEKEIVKSEKTLSGWIYDVLKNDVNTGERTKIIGGLFQTIDRKFYREELYQIINTQRKFHTSTLDDKDTFEKCVKLLYPHNKDHSKTLLENKQALTNLLIEDILLYQRPLKSKKSEISDCKYEIDYWKEDVNISTGEVVEIPVYKKAIFASHPLFQEFRIWDKIHNIKLIQLESKDADGNTQTNVDITSQYFKPENYRALFNHFNGRSTVAIDDFLKFCEEQFKLGIGKKGERKILWNYPVEEEFKGNETRKGFENRFRKCGFDGFDDFMTQQKEIELWHYLYSVSSAERKKVSQVKDSSDPKFGKTGIWNFFTKYFKDENISLETLEKLCRDFETYPKFTSKYASYSVKALNKMLAVMRVGKNFLTAESVNEKWQEKYIERADTIIKKNNEIDWSAESIDLTDIILNDVNVKNGEIPFPKGLFNTFKSFETVDDFEFLNLTQASYFIYGRHSELAQAKYWNSPTKIREEITKELKHHSLNNPTAEKVLKETLKVVADIWEIYGNSEEKFFNEIHLEVARELQKSNQEKKDIIERQKNNRAENNRIRNILEEFLSSSPYNAKRGNQDHFERLKIVEDGAKVRSYSDKEFYSNNKDKFSKIDIEVILKKKKITQSDFEKYKLWIEQGYKSPYTDQIIKLTDLFDGNKYNVDHIFSRAAITNDSLNNKVVCEAVINRFKSYKTGREFIAQFGGKTHTIFDDKLNKNVTFSLIDEDAYVSLVKSQFKDAKRLILLSKEVPKAFTESQLNNAKYIARKAMELLSHIVREEGEVEFRSKNVLPVSGAITDRLKKEWKINQIWTELLKPRFERLNKIHNSEAFGSYAISKSGHQYFDINTKYILGENDKFDLKRLDHRHHALDALIIALCTDNHVQYFNNINSGITNKKKGKMEAIKKQRAGIKRQIMYSEKDKENPNEKVWRYMLPGSFRNKESVNNEKDSVVDLSWENNYSAKESNDYRKTILECLDNCIVSFKNDFKIVSKSSNKYESYYDENGNLRLDSNGKPQKEFISQQNNNQKHWSVRKPLHTDNPSAEITLQFDRLKLIDNLGKVDLIIEEKIKDAVKEILGMHNNKIGKAESYLKKNPLILEEKKIEYTDFKISNKKYRKRQPITNLSVRTGTGALPTYDSVVDRINKVSDFVLRNELLQHLKINDNDIDKAFSIEGINEFNSNRKIPVFRLPISESATLKFKIGHKNSNSHKWVETGGNFHFRIADEENSRDYETIPLRIAIEMEKDNIIRRQIVDNENEIVLSPNDLVYVPLEKNEIVDFNNLTIQQIKRIYKFVFSTKKEAHFIPYSSSAEIIKNENGTNGYSERTKDFFDGNVLQDDKGKPIQVKSVCWKLKVDRLGNISKA

SEQ ID NO: 268 - RNA, 17 nt, Pedobacter sp.
guugugauuugcuuuca

SEQ ID NO: 269 - RNA, 84 nt, Pedobacter sp.
ugaaagcaaaucacaauaaggauuauuccguugugaaaacauuuggguugccucuuguccacaaaucaggaggcuuuuuuauuu

SEQ ID NO: 270 - DNA, 6 bp, Artificial Sequence
  source: /note="Description of Artificial Sequence: Synthetic oligonucleotide"
  modified_base (1)..(2): a, c, t, g, unknown or other
nnaarg

SEQ ID NO: 271 - protein, 1224 aa, Chitinophaga sp.
MKKLIVGLDLGVNSIGWAVVGDDDSNRQILGMGSRIIPLSPDDNNEFVTGNAISKNAKRTEKRTQRKGYDRYQQRRRKLVAFLERHSMMVEKELMCLPPLELWALRNKGITQALSSRELGRVLYHLNQRRGYRSSRSEESSDGKKNTAYVEEVKGRYEELKTRGITIGQHFYQKLQTAHNRNEPYRIKQQVFPRQAYIDEFDAIINQQKNHHSSLTADEIAFLRDEIIYMQRPLKSQKGLVSICEFEGQYRKNAKDAEVFVGPKVAPRSSPLAQVCKIWESINNITFTNKRREPYPINTDQKLRLFDALNKTERLSQKAIFFILGIKPGDGYTGNKQTAKGIQGNLTNAAISTIIPERKDLLNFELKIVVDEEDAHLINRSNGEIISTVQKKTVSADYERSPFFRLWHVIYSISDIDKCIETLMEKFGLTKEQAVALSRLDFRKAGFANKSARAMRKILPYLMDGHIFSDAMSLAGYNHSASLTHEENLKRQLKGSLPLLKKNSLRQPVVEKILNQMIGVMNAIIKEWGRPDEIRVELARELKQSAEERNKAFAALSKREREGEIITKRIEAEFRQFGIRATRNNILKWRLFHEISNDEARLNATCVYCGHPFGITDALRGSSVDIEHIIPKSKLFDDSQGNKTLVHRRCNEDKGDRTAFDFMSAKGESVLASYIETVDRLYQSNVISRHKRDRLLTTGDDIPKDFIERQLRETQYIARKAKEILEQICYNVWSTSGQITEYLRRIWGWNDVLMNLQLPVYRDLGLTEWKEYTDRDGNLHRQEVIKDWSKRNDHRHHAIDALTIACTRQGFIQRINRLNATNNREEMRASLNGNYDPKKNLLENYIFALKPFSTKQVEVAAAQILISFKPGKRVATLSKLKAKGKNSGTGVIVPRGPLSEESVYGRVRLMDSKKQPVRYLFEHPELIFKPYIRVLVEERLASYSQDLKKALASLKKDPIYLDGTKTIILEWGSCYKDEVVIKYPLTDIKAKDTQFIIDGHIRAIVNERLSQYKGNEKKAFEHPLYSDAACTKEIRSVRCLTGLTAVVSVKKDESGREIGFVKPGNNHHIALYTDAEGQKREHLCTFWHAVERKKWGMPAVITQPGVIWDNILQKQDNFPQAFLEKLPLEAWTFDKSLQQNEMFIVGLTIEEVQTCIDSFDYARLSKHLYRIQKLSSTGYKIVLRHHLATTIEHTRDMIGIASPSSFTGIKVYVSKTGKISMPHD

SEQ ID NO: 272 - RNA, 14 nt, Chitinophaga sp.
guugugauuugcuu

SEQ ID NO: 273 - RNA, 78 nt, Chitinophaga sp.
aagcaaaucacaauaaggauuuuucuuccguugagaaaucauucacgccgcccucgucguuuaucgggggcuuuuuuu

SEQ ID NO: 274 - DNA, 6 bp, Artificial Sequence
  source: /note="Description of Artificial Sequence: Synthetic oligonucleotide"
  modified_base (1)..(2): a, c, t, g, unknown or other
  modified_base (5)..(5): a, c, t, g, unknown or other
nnrrna

SEQ ID NO: 275 - protein, 1457 aa, Mucilaginibacter sp.
MKNILGLDLGTNSIGWALIQSDFDNKEGKILGTGSRIIPMSQDIKDEYGKGNSISQTADRTRFRSLRRLRERHLLRRERLHRILNILGFLPEHYADQIDFKNRLGQYLPEKEPKLAYRNNEFIFKASFEEMLIDFREQQPEMLQGDKKVPYDWTIYYLRKKALTQKVEKAELAWLILNFNQKRGYYQLRGEEQQENPNKKVEFHSLKVVDVIADETQRGKAETWYSLILENGWVYRRSSKTPLDNWRDKQRDFIVTTDLNDDGSIKKDKDGNIKRSFRAPDENDWTLLKKKTEQDIDHANKTAGAYIYDHLLVAPDQKIKGKLVRTIERRFYKTELKAILAKQQNFHAELQNKDLFLDCVRELYRHNLSHLSNLNQKDTIHLLTEDIIFYQRPLRSQKSSIGNCPLEFRRYQNKEGGDQTEYLKVIPKSHPLYQEFRLWQWIYNLGIYQKEDDTNVTADLIKGIQGYQDLFDFLNSKKEIKQDTLIKFLLSQTGLKGKELNKAALTLRWNFVEDKTYPCNETGTEIRARLAKVAYIPENFLTAEKALSLWHIIYSVNDKKEYELALRKFAKKHQIDEETFFINFQKFPPFQSEYGAFSEKAIKKLLPLIRLGKYWHWEAIDPKSQERIEKILSGEADQNIKERIREKAMHLTREEHFQGLQLWLANYIVYDRHAEAANPDKWSTVSDLEDYLKELKQHSLRNPIVEQVVTETLRVVKDIWLTYGNGAKNFFDEIHIELAREMKNTMEERKRLTSIVTDNENTNLRIKALLVELFEDGNIENVRPYSPIQHEALKIFEDGILNSGIEIDDDILKISKTPQPTSTELKRYKLWLEQKYRSPYTGNVIPLNRLFTTDYEIEHIIPQSRFFDDSFSNKIICESAINKLKDKQLGLEFIKNHAGTIVELGLGKTARVFDEERYQDFVKANYTKNPGKRSKLMLEEIPDKMIARQLNDTRYISKFITSVLSNIVRSETKDDGVNSKNVLLCNGRITSVLRQDWGMNDIWNELILPRFERLNQITDSTVFTAWNENHQKFLPTVPMGFSKGFQRKRIDHRHHAMDALIIASCTRDHINLLNNEYAKSSKRFDLNRKLRKFEKVAYKSPVNGQQIDKDIPTVFIKPWQRFTIDAKCSLEDIIVSFKQNLRVINKTTNYFDGYKDEHGIVNFDNKGAPVKQQRKQTKGDSWAIRKPMHKDFVYGKVDLKHIKIPKGKFATAIRKSLDTTFDQKKIQTITDTGVQKILINYLQSKDNKAELAFSPEGIEDMNQNIRAYNDGKLHQPIKKVRVFEIGSRFPLGETGNKKTKYVETAKGTNLFFAIYQHKNKRNYETVPLNTVIERQKQHLSPVPTEDDKGGTLLFYLSPNDLVYVPTPDELGNNLGGLDIRNLNKEQRRRIYKVEKASGVECYFIRQDIAYLIKSYDATTKIGELESQNKLQTTMSSDRLKIADVCIKLKIDRLGISR

SEQ ID NO: 276 - RNA, 18 nt, Mucilaginibacter sp.
guugugauuugcuuucau

SEQ ID NO: 277 - RNA, 75 nt, Mucilaginibacter sp.
augaaagcaaaucacaauaaggauuauuccguugugaaaacaucuaagucgccucgccuuacaaugcggggcuuu

SEQ ID NO: 278 - DNA, 5 bp, Artificial Sequence
  source: /note="Description of Artificial Sequence: Synthetic oligonucleotide"
  modified_base (1)..(2): a, c, t, g, unknown or other
nnraa

SEQ ID NO: 279 - protein, 1662 aa, Acidovorax sp.
MKKILGLDIGTTSIGYSIIKVSDEKNENIISDKVAASDINNDRIGIFEEAIGVRIINQDTDRFDRGLKLNDPKGSTLTPTANRRKFRGVRRMRNRYKLRRNKLYKVLSILGLTPDESYFTNKKGKRGKDNDIGKALYGLRERAAREKISLSELARVLLHLNQLRGYSSDRFANDEETKFDYYLTEVVEADWENRTAVFEKGSTEDVKYYQFKAKLRFVEPYVIVEDDEKTILYEVEGYIFKKELDFEVGDFITIKAPEFKQNKKGKVVIEEYYKITPTKPDATDWKYKYQTLHKNLSDWCKAGGTVGSYFYKNFYELTTLSRIRNNVVNREWYENEFDAIWTLQYEFYKDFFEKIDVSELVKGVFKDYSAVLNDVISKSGNKAQLQTLIKDKIIFYQRPWQQAKSKGRCEFEKIKVKRKFAIKGTGTKELREEHIGRKVVPRSHPIFQDFKVWQQINNVRLIWNTADEKINLFENAELSEKLTGKTIEKVKELLFKKLQGSKTLSWRTFVKEELGLDTYDEIEEKRKSKVSKKQGLDIETGEIVDSFFSVNFRKRKRDGTFDDIKLKGNTTKAELQNILKEKRAEWFDTLHNQNKKVTNLQLLWEIIYDITNSDATKVSSIIKKHFDFDESVCLTLAKVQFDDAGMANLSAKAIRNLLPLMSDGANYSKITKAKVDELISLNTSETDVDADDKLNGLKDFVTDRKARIRLSKFSNENDFKYLNYWEAAAIVYGSHSSKKSSETKIMERVKNHSMNNPVVEKIVNEAISIVNLLKEKYGFDEIRIELSRELRASADERQQMWEGMSNGAAKNEWAKKMLREIKQAMLDNNRDISYLDTEISNSNLDKIKIIEDVVKYQKPVEFKTKEKEYKLTEPTKAEVTKYLLWLEQNFKCPYTNQPIPLTDVFARGKVVEIEHIIPRERYYSNAYANKVITWREVNQEKGNKTAYEFIVSKRNPAGTVQVGKKEISLVSASQWENHVKEMFPKSGKRTNLLRKEIPEDPIERTLKENQYINKKLKEKLGELVGSDKVWVTSGAITDMLREKWKLNDIWKELVQERFLKFNNGEVKDRLNLKYTTKYYNNKTNQYEDVEKFAGMSKRIDHRHHALDAIIIACTKQSHIQYINNLNAINSADIENDDNKKTKYKGIKTDVCIGNSSSKFKFPWDENKFIPEVKQALQNILISHKNSNVLISPSKHRNNKDINSGKVASVRGELHLQTNYAKKKYFENEKIDIVKLIPLLFKKKFENQNQTLVRFKSFDEIIKEAVLKEKYQNVLISLFKDYDSEKLSTQTTKDFSKKILKRIEDEKLFIHEKSGEKMTWLSTFTEKNASVRPMGLAMDLNSEKEIKDISNPRLRRIGQYRLNYINKKIIEIKALKLPFKEEENNRIREVREIPLYNNAIYELRIKQKDGKYHWVEIKDVQHSDLENIEYAKQETTIAVKNKIKDFSLDELKERYISNPIFLSEKPTPVKKARQKSFFQDLYQLNDGRYVYSRDVFMTYVFVPEDSNRKDAKRELEFLKFFDAVKIVTLEKPEKIDYQKLIKKEDHKLLFTLSKNDIVYIPEEILTDEQIAEINWNDKRDIVPKLFVVKEMTPSRNEIVFQHLYKSDSIRVNGDEAKNILNTEKLEEQIKYGDTNMWKRCIKVDIDKLGTEIKPYWENNKIVL

SEQ ID NO: 280 - RNA, 14 nt, Acidovorax sp.
guugugaauugcuu

SEQ ID NO: 281 - RNA, 63 nt, Acidovorax sp.
aagcaauucacaauaaauuuuuaauguugugaaaacauucaaagcggcgcaagucgcuuuuuu

SEQ ID NO: 282 - DNA, 6 bp, Artificial Sequence
  source: /note="Description of Artificial Sequence: Synthetic oligonucleotide"
  modified_base (1)..(4): a, c, t, g, unknown or other
nnnntc

SEQ ID NO: 283 - protein, 1075 aa, Bacillus sp.
MDYRIGLDIGTNSVGWGVIRMQYNDLLERYEKQGIVDAGVRMFDKAEIPKTGASLAAPRREARSSRKRLRRRSQRKKAIRYLIILHELLSEDQLQQLYPLQKESIDIWDIRLESLDRVLNQTEWARLLIHLGQRRGFKSNRKSEYKEEETGKVLVNIQENQKALQQYRTVAEMWMKDAKFSQFDKKRNAPGEYLFSVSRYDLQNEIQTIFESQRNLGSPYATTDLEEEYISVWSKQLPFASGEDILKKVGYCSLERKERRIPKATYTFQYFILLDGLNKIRVGADARQLTTEERSILIEKILTRNDYFSKKSLPDLTYGDLRKWLALDSSLLFKDLTYDPNEKVSKVEKKVFANLKSLYELRKVVETSSNGQSFERIDYDTFGYALTVYKTDEDIRRYLKKPSNLAHKVYEEDLIERLLSLSYEKFGHLSLKAIQTILPYMEDGMMYTEAVQAAGYDITGLQSAKRTLLLPTIPADITNPVVRRALTQTRKVVNAIIKRYGSPLTIHIELARELSKDHQERQQILKNQQANYERNKGAISVLVENGILNPTGYDIVRYKLWKEQGERCAYSLKVIPPSVFFGELKRERNHIPTLEVDHILPYSQSFMDNYHNKVLVYSDENQKKGNRIPSQYLMAVSPEKWTKFEEYVSSNKGFSKQKRQYLLKKDYSSRERDIVKERHLVDTRYATRFMKNFIEKTLLFKESRSSSLTKRVQTVNGKITAHFRKRWGLEKERTETYLHHALDAIVVACTDQHMVTRVTEYYQERERNVRQPYFPWPWEGFRDELLNYLNRQPDSLEISQSIKQNLFLRDYLMVSRMPKHSVTGMSHKQTIRSKACVDEKGKVKTTKRVLLQDIKFDSNGDFKMIGKEQDMATYNAIKERFLSSGGNVKSAFTEPLHKPSKKGKGNVIRKVTVEDQTKSFVRDVNGGVAENGSLVRIDLFEKEGMYYVVPIYVGDTVLKQLPIKISASNRGYYKWVELDENYRFKFSLYAHDLIRIVTKDEDRFFYFSYFDNDGNRIKFLNINSPTGKNENRYGVRSIKLIEKYNVSTLGDISLVKSEERQLFQGMKKKVLNIIN

SEQ ID NO: 284 - RNA, 17 nt, Bacillus sp.
gucauaguuccauuaaa

SEQ ID NO: 285 - RNA, 83 nt, Bacillus sp.
uuugauguuccuaugauaagggccuugagcccguggcguuggggaucgccugcccguuuauacgggcuucucccuacuuacuu

SEQ ID NO: 286 - DNA, 6 bp, Artificial Sequence
  source: /note="Description of Artificial Sequence: Synthetic oligonucleotide"
  modified_base (1)..(4): a, c, t, g, unknown or other
nnnncc

SEQ ID NO: 287 - protein, 1068 aa, Bacillus sp.
MKYVLGLDIGIASCGWAVINQEKHRIEDLGVRIFDKAENPKDGKSLATPRRDARSTRRTLRRKKHRMQRIKILLVKHGLLSKTEIDHLYESATEIDVWYLRLNALERRLNPKEFARVLIHLAKRRGFKSNRKETTLSENGQILENISENLQIMEQQNYRTVGEMILKDKKFENHKRNKDGTYIGTVTRQQLKEEIQMIFNAQRLYKNDYATEEFESSYLEIWASQRPYASKDQIEKMIGYCTLEPKEKRVPKASWSFQYFVALQTINNLRLINKDRIEELSFEEKNQIMNLALEKSIVKYIDIRKLLSIPNEFHFNNLLYSADTVDTAVENKKCIEFKEYHSINKLYKQIYGKSVPNLLPIDYDTIACGLTIFKDDKDILAYLQNKYVNAKGKPISNLAKKTYDDTFIQALLTLNFSKMGHLSFKALKNIIPFLEEGLSYDKACEKAGYNFKGTSHAEKTKYLPVIPQNTNPVVHRALSQTRKVINAIIKKYGSPSAIHIETARELSKTFQERKEIDSMYQDNSKKNEHAIHKLKELGLINPSGINIVKFKLWNEQDGRCMYSGKYIEPHRLFEEGYTEVDHILPYSRSLDDSYNNKALTLGIENQRKGNKTPYEYIGKTSIWHEFETRVQSNKRINKKKQQKLLLQYFSYTREQEFIKRNLNDTRYATIYLSTLIQQHLIFSESSRKKKVHTVSGIITSHLRSRWGFNKDRKEGHIHHALDAVIVAVTSDHMIQRVTKYYKLKELNRNLQAKRMQFPEPWEGFRLELEARISPNTQQYLKRILFKNYADVNLSEIKPIFVSRMPKRSITGELHQETIRKLIGYNEKGKVLTAIKTKLEDIPFDANGDFPMYGKETDLYTYNAIKERYLSHKKDKRKSFQDPLYKPTKSGEIGPLIKSIKIMDTRTIVNPVNQGKGVVYNSKIARTDVFKKDEKYYLIPIYTIDLLKNILPQKAITAGKGYEDWTTIDPSFTFLFSLFPNDLIQIVPSKNKTIKARTTVSKKEVLLPSLTGYFKGVHSGTAGITVETHDGSVIANVGSKQLLLFEKYQVDVLGHYTKIKEEKRIGMVI

SEQ ID NO: 288 - RNA, 19 nt, Bacillus sp.
gcuauaguuccauaagaaa

SEQ ID NO: 289 - RNA, 115 nt, Bacillus sp.
uuucuuaaguuacuauaguaagggcaaugacccguggcguuuggggaucgccuuauccugguauggauauucuccccaugugaaaagcaccuaagcauagcgcuauggugcuuuu

SEQ ID NO: 290 - DNA, 5 bp, Artificial Sequence
  source: /note="Description of Artificial Sequence: Synthetic oligonucleotide"
  modified_base (1)..(4): a, c, t, g, unknown or other
nnnng

SEQ ID NO: 291 - protein, 1081 aa, Bacillus sp.
MQYVLGLDIGIASCGWAVINQEKERIEDLGVRIFDKAENPKDGKSLAAPRRDARSTRRTLRRKKHRMQRIKILLVKHGLLSQTELDHLYESATEVDVWNLRLDAIERKLNPKEFTRVLIHLAKRRGFKSNSKETTLSENGQILESISENQQIMEQKNYKTIGEMILKDKKFENHKRNKDGTYIGTVTRQQLQDEIQIIFNAQRLYKNNYATKEFESSYLEIWASQRPYASKDQIEKMIGYCTLEQKEKRVPRASWSFQYFVALHTINNLRLISKDRIEELSFKEKKQIMNLALEKPIVKYIDIRKLLSIPNELHFNSLLYSADTVDTTVENRKCIELKEYHSINKVYKQIYGKNALNLLPIDYDTIAYGLTIFKDDKDILEHLKNKYVNAKGKPINNLAKKTYDDTFIQALLTLNFSKMGHLSFKALKNIIPFLEEGLSYDKACEKAGYNFKGTSYTEQTKYLPVIPQNTNPVVHRALSQTKKVINAIIKKYGSPNAIHIETARELSKTFQERKEIDSMYQDNSKKNEHAIHKLKELGNINPSGINIVKFKLWNEQDGKCMYSGKYIEPHRLFEEGYTEVDHILPYSRSLDDSYNNKTLTLGIENQRKGNKTPYEYMGNTSIWDEYEIRVQSNKKINKKKQQKLLLQHFSYAREQEFIERNLNDTRYATIYLSSLIQQHLIFSESSRKKKVHTVSGIITSHLRSRWGFNKDRKEGHIHHALDAVIVAVTSDHMIQRVTKYYKLKELNRNLQAKRMPFPEPWEGFRLELEARISPNTQQYLKGLRFKNYADVNLCEIKPIFVSKMPKRSITGELHQETIRKFIGYNEKGKVLTAIKTKLEDIPFDANGDFPMYGKETDLYTYNSIKERYLSHKKDKRKSFQEPLYKPTKSGGIGPLIKSIKIMDTRTIVNPVNQGKGVVYNSKIARTDVFKKDDKYYLIPIYTIDLMKNILPQKAITAGKGYEDWITIDHSFTFLFSLFPNDLIKIVPSKNKEIKARSTSSKKEILLPSLIGYFKSVHSGTAGITVESHDGRFIANVGSKQLLLFEKYQVDVLGHYTKIKEEKRIGMATCNDNKKSTAFGSL

SEQ ID NO: 292 - RNA, 16 nt, Bacillus sp.
gcuauaguuccauaag

SEQ ID NO: 293 - RNA, 111 nt, Bacillus sp.
cuuaaguuacuauaguaagggcaaugacccguggcguuuggggaucgccucauccauuacggauauucuccccaugugaaaagcaccuaagcauaaggcuaaggugcuuuu

SEQ ID NO: 294 - DNA, 8 bp, Artificial Sequence
  source: /note="Description of Artificial Sequence: Synthetic oligonucleotide"
  modified_base (1)..(4): a, c, t, g, unknown or other
  modified_base (6)..(7): a, c, t, g, unknown or other
nnnngnna

SEQ ID NO: 295 - protein, 1404 aa, Chryseobacterium sp.
MKKTLGIDLGTNSIGWVIRNADLLDNQIEDFGVITFEKGVASEKGNEFPKVQKRTESRGKRRNYQSEKYRKFALLAFLIQKNMCPLTMDEFCNWKDYRKGKKREYPQSEEFLNWIRFDFNGDGLPDFHLFGKEKDDSYYVFRAFAADENHKNVFDNNPHILGRVLYQMVQRRGFKGRDEEEAKTMLVGSDKNGTKGRNDIEEYIEKYKTLGAALYYHQKDFGGRIKQRYNLRKDNENELKEICKIHQLSQEDYEKLWKAIIWQRPLRTQKGLVGNCIYEKNKKRVAVSHPLYEEYRTWVFINNLNIIPPFGEEKQNYISEKIYPLFYKSKPDFELSDIDKQLKKDGAKRTSKHNDKTKVLSVKLLKQFQDVFGEDWKQKLQWDINGDRNSQPEKKEKSLYTFEDLWHILLTFDGQENLKKFALEKLNLDDEKAIKFSKIKLQQGYATLSISAIKKILPYLQRGFLYSHAVYMANLYKMLGETTISETLTNHFSDEILKILENDDFNRKNSAIINSLISEMLNDDNRYYIADNRNLDKTEEQIVLKSITDNYGLETWGNFDEEKKMEIIDFVSSKYLEFLKKTYTEKGNLFIQPERIHDKIFNFLKETYHVSEDKIKYLWHPSEQENYAKADEYFEYSIGSKKYYVKEESTQNFLSRNPNAEFDGRQLKLLGNPEPLSKGFKNPMALKSLHKLKNLVNYLLQTGKIDEGTRVVIEIARELNDKNKRKAIENWQKDREKENEAFRKEIEVYKEQFPNINLIDENTLIRKIRLWHEQNKICLYTGKTIPFSELIIGNKYDFEHTIPASISFDNELKNLTISDSSYNRLYKGKKFPTQLSNYDSEQTINGESCNSILRNIEFIFGERIVEYKEIKGKTEKIVKWKKIDELEKQFDEWKKKASYASTKEIKDNCIVKYHTIKMDLDYLKSKLATFTITEYKAGWRNSQIRDTQIITKYALPYFKTLFKRVSVEKGGVTDIFKKVYKVQSRNSKKDRSVHSHHAQDAAILTLIPNAFHRERIIKAYENEIDNRTGKTYHEQPLDWENFSEKYILELQDKVLINNLTDNRTITQTYKTVRKRGKVVYDIDENGNSLKRVSKGDTIRGQLHGETFYGAIKQPVRDEDNKILFDENKKMILKDEIYLAVRKPLVYKKDANSPGFKTLDEVEKVIVDKGLFKMIKKQVEESDFKTALIDGVYMLNESGEKVNKIRRIRCFENGLKYTTAIKVHEHSFVSHKEYKQSTLATNGENTYCLFYKNDKGKAMKILSIVDLAELKLKNIQNLYNEPEFSSFEVGKGKNKYKIPLYSVLKSGDKVLFYKENIYELKDLEQKELSDRMFKMYQFEKDGRIKFRHHLAAGIDTELKKENPENSSVNFEEKQVFLRLSQGQWNFAIDGKDFEISLDGKINWKF

SEQ ID NO: 296 - RNA, 15 nt, Chryseobacterium sp.
guugugaauugcuuu

SEQ ID NO: 297 - RNA, 68 nt, Chryseobacterium sp.
aaagcaauucacaauaaggcuuaaaagccgaagaaaaucuuuaguccugcguacuccgugggauuuuu

SEQ ID NO: 298 - protein, 1092 aa, Bacillus sp.
MRYSIGLDIGTTSIGSAVINNDLQRFEHLGVRIFDAAENPKDGSSLSAPRRLARSSRKRLRRRKHRVERTKQILINKGLLTKTQVKNLYNSKNVNLDVWDIRVSGLDRKLFNDEFARVLIHFSKNRGFKSNRKSELKEDDNGAILSAVKENKELMEEKGYRTIAEMLVLDERYEGTKRNKDGDYSHVVSRSDIENEIRLLFQKQREYGHPFAIEENEEAFLAIWSSQRPFATKDDIVKKIGTCTLEPREKRAPKSTYTFERFRALDKLNRLRILSTTTPSRPLTNEERDSILNSLFSKKEVKYKELRKMLKLTDDQRFNEIYYSPDETIEKTENRVFLSSESQYKIKKIIEKTESKNMLSTYCPIDYDTIGYALTVFKDDKDIQHYLQNRYVDSKGKAISNMANREYNLELIEELLGLSFSKFGHLSLKALNNILPYMEEGEPYHIACEMAGYQFSQRLTKEKHRLLPPIPVDEIPNPVVVRALTQVRKVLNSIIKKYGPPSDIYIELAREMGKPFKERKSLEREFNENRQVNEKAKAHISELYRVPNDPRPHDILKFKLWKEQNGICPYSFKPISVDYLFNIGYTEVDHIIPYSRSFDDSNGNKVLVLTNENRNKLNRTPYEWFGHDENRWGDFVSFVRTMKVGKKKKDMLLKKNFDEEQEEQILSRNLNDTRYITRYIKSFIEDNLEFRTEENKKQYVHTVNGGYTSLMRKRWGLNKDRRGNDLHHAVDAAIIAVSLPFKHKVNTYFKRQEIGLSNLSNNKKDIFPEPWRNFIKELEARMIQDPEKMKTALESLELETYGEIFLNKLKPIFVSRMPKHSIKGQIHEETIRRVRGLTEEGFLVTVKKTRLDQIPFDKNGDFPMYGKETDIKTYMAIKQRYLEYGQDKQKAFAIPLRKPSKNPENAPIVRSVKIEGKANRVVMLDDKAAADNASIARTEVFRHKETGEYYVTPVYVADIVSNKIPDRLITLKKPYSEWDRITDEYEYLFSLYNNDLIKIVLPKEKETKKYTGGNHLWQEGFFYFKGVDSSNASIKIIDHLNSFEVRIGIRRLIAFEKYQVNPLGEINKVHGEKRPGELLNEEEIKENRKNIS

SEQ ID NO: 299 - RNA, 23 nt, Bacillus sp.
gccauaauuccucuguaaaacuu

SEQ ID NO: 300 - RNA, 112 nt, Bacillus sp.
aagguuuauagaguuauuaugguaaggcaauaugccguggcguuggggaucgccuauguccgguuuuaccggaucucccuagaggugacuaacuuugguuagucgccuuuuu

SEQ ID NO: 301 - DNA, 5 bp, Artificial Sequence
  source: /note="Description of Artificial Sequence: Synthetic oligonucleotide"
  modified_base (1)..(4): a, c, t, g, unknown or other
nnnnc

SEQ ID NO: 302 - protein, 1150 aa, Enterococcus sp.
MYSIGLDLGISSVGWSVIDEETGKIVDLGVRLFSAKNSEKNLERRTSRGARRLIRRKTNRLKDAKKLLEAIGFYEDKALKNVCPYQLRVKGLTEGLTKGELYKVVLHIVKKRGISYLDEDDAEAAKESQDYKEQVRKNAQLLTKYTPGQIQLQRLKENNRVKTGINGQGHYQLNVFKVSAYADELATILKTQQALYPNELTDDWIALFVQPGIAENAGLIYRKRPYYHGPGNEANNSPYGRWSDFQKTGQPAANIFDKLIGKDFQGELRASGLSLSAQQYNLLNDLTNLKIDGEVSLSPEQKEFILTELMTKEFARFGVNDIAKLLGVKKEQLSGWRLDKKGKPEIHTLKGYRNWRKIFAEAGIDLATLPTETIDCLAKVLTLNTEREGVENTLAFELPELAEPVKSLVLDHYKELSQSISTQAWHRFSLKTLHLLIPELIKSTSEQNTLLEQFQLKAGVRKRYSDYKKLPTKEVLAEIYNPTVNKTVSQAFKVMDALLEKYGKDQIHYITVEMPRDDNEEEERKRIKELQTKNSQRKNDSQQYFLQKSGWSQEKFQATIHKNRRFLAKLLYYFEQDGVCAYTGNPISPELLVSDSTEIDHIIPISISLDDSINNKVLVLSHANQVKGQQTPYDARMAGAFNKINGKFSNWDEYQKWVESRPFSRKKVNNLLETRNIFDSEQVQKFLSRNLNDTRYASRLVLNTLQSFFENQDTIVRVVNGSFTHTLRKKWGADLDKTRETHHHHAVDATLCAVTPFVKVSRYHYAVNEETGEKFMREIDVETGEILDEIPYREYKKAKHYERKTYQVKWSNFREQLKPITIHPKIKFSHQVDRKANRKLSDATIYSVREKTEVKTLKSGKEKITTDEYTIGKIKDIYTVDGWEAFKKKQDKLLMKEFDEKTYELLVTIAATTPDFQEVEEKNGKVKRVKRSPFAVYCEENGIPAIRKYAKKNNGPVIRSLKYYDGKLNKHINITKDEKGRPVEQTKNGRKVTLQSLKPYRYDIYQDLETKAYYTVQLYYSDLRFVEGEYGITEKEYMKKVAEQTKGQVVRFCFSLQKNDGLEIEWKDSQRYDVRFYNFQSANSINFKGLEQEMIPAENQFKQKPYNNGAINLNIAKYGKEGKKLRKFNTDILGKKHHLSYEKEPKNIIK

SEQ ID NO: 303 - RNA, 19 nt, Enterococcus sp.
guuauuguacucucaauaa

SEQ ID NO: 304 - RNA, 67 nt, Enterococcus sp.
uuauugagaaucuacaauaauaaggcaucuugccgaauuuaccgcccuacauauguagggcgguuuu

SEQ ID NO: 305 - DNA, 5 bp, Artificial Sequence
  source: /note="Description of Artificial Sequence: Synthetic oligonucleotide"
  modified_base (1)..(2): a, c, t, g, unknown or other
nnrya

SEQ ID NO: 306 - protein, 1150 aa, Enterococcus sp.
MYSIGLDLGISSVGWSVIDEETGKIVDLGVRLFSAKNSEKNLERRTSRGARRLIRRKTNRLKDAKKLLEAIGFYEDKALKNVCPYQLRVKGLTEGLTKGELYKVVLHIVKKRGISYLDEDDAEAAKESQDYKEQVRKNAQLLTKYTPGQIQLQRLKENNRVKTGINGQGNYQLNVFKVSAYADELATILKTQQALYPNELTDDWIALFVQPGIAEDAGLIYRKRPYYHGPGNEANNSPYGRWSDFQKTGQPAANIFDKLIGKDFQGELRASGLSLSAQQYNLLNDLTNLKIDGEQPLSPTQKEFILTELMTKEFARFGVNDIAKLLGVKKEQLSGWRLDKKGKPEIHTLKGYRNWRKIFAEAGIDLATLPTETIDCLAKVLTLNTEREGVENTLAFELPELAEPVKSLVLDHYKELSQSISTQAWHRFSLKTLHLLIPELIKSTSEQNTLLEQFQLKAGVRKRYSDYKKLPTKEVLAEIYNPTVNKTVSQAFKVMDALLEKYGKDQIHYITVEMPRDDNEEEERKRIKELQTKNSQRKNDSQQYFLQKSGWSQEKFQATIHKNRRFLAKLLYYFEQDGVCAYTGNPISPELLVSDSTEIDHIIPISISLDDSINNKVLVLSHANQVKGQQTPYDAWMAGAFKKINGKFSNWDEYQKWVESRPFSRKKANNLLETRNIFDSEQVQNFLSRNLNDTRYASRLVLNTLQSFFENQDTIVRVVNGSFTHTLRKKWGADLDKTRETHHHHAIDASLCAVTPFVKVSRYHYAVNEETGEKFMREIDVETGEILDEIPYREYKKAKHYERKTYQVKWSNFREQLKPLTIHPKIKFSHQVDRKANRKLSDATIYSVREKTEVKTLKSGKEKITTDEYTIGKIKDIYTVDGWEAFKKKQDKLLMKEFDEKTYELLVTIAATTPDFQEVEEKNGKVKRVKRSPFAVYCEENGIPAIRKYAKKNNGPVIRSLKYYDGKLNKHINITKDEKGRPVEQTKNGRKVTLQSLKPYRYDIYQDLETKAYYTVQLYYSDLRFVEGEYGITEKEYMKKVAEQTKGQVVRFCFSLQKNDGLEIEWKDSQRYDVRFYNFQSANSINFKGLEQEMMPAENQFKQKPYNNGAINLNIAKYGKEGNKLRKFNTDILGKKHHLSYEKEPKNIIK

SEQ ID NO: 307 - RNA, 19 nt, Enterococcus sp.
guuauuguacucucaauaa

SEQ ID NO: 308 - RNA, 67 nt, Enterococcus sp.; identical to SEQ ID NO: 304

SEQ ID NO: 309 - protein, 1053 aa, Staphylococcus sp.
MKRHYILGLDIGITSVGYGIIDYETREVIDAGVRLFKEANVENNEGRRSKRGARRLKRRRKHRLQSVKKLLFDYDLLTNHSELSGINPYEARVKGLSQNLSEVEFSGALLHLAKRRGVHNVNEVEEDTRNELSTKEQISRNSKALEEKYVAELQLERLKTDSEVRGAINRFKTSDYVKEAKQLLKVQKEYHQLDQSFIDTYIDLLETRRTYYEGPGKGSPFGWKDIKEWYEMLIGHCTYFPEELRSVKYAYNADLYNALNDLNNLVISRDDNEKLAYYEKFQIIENVFKQKKKPTLKQISKEIFVNEEDIKGYRVTSTGKPEFTKFKIYHDIKGIKERKEIIENAEVLDQIAEILTIYQSSEDIQEELAKLNSELTQEEIEQISKLTGYTGTHSLSLKAINLILDELWHTSDNQMAIFNRLKLVPKKMDLSQQKEIPTTLVDDFILSPVVKRSFIQSIKVINAIIKKYGLPSDIIIELAREKNSKDAQKLINEMQKRNRQTNERIEEIIRTTGKENAKYLIEKIKLHNMQEGKCLYSLEAIPLEDLLNNPFNYEVDHIIPRSVSFDNSFNNKVLVKQEENSKKDNRTPFQYLSSSDSKMDYETFKKHILNLSKGKDRISKKKKVYLLEERDINRFSVQKDFINRNLVDTRYATRELMTLLRSYFSVNNLDVKVKSINGGFTSFLRRKWKFKKERNQGYKHHAEDALIIANADYVFKEWKKLDRANKVMENQTVEENQAESMPEIETEQEYKEIFITPHQIQHIKDFKDYKYSHRVDKKSNRELVNDTLYSTRKDDKGNTLIVNNLNGLYDKDNDKLKKLMNQSPEKLLMYHHDPQTYQKLKLIMEQYGGEKNPLYKYHEETGNYLTKYSKKDNGPVIKKIKYYGNKLNVHLDITDDYPNSRNKVVKLSLKPFRFDVYLDNGVYKFVTIKNLDVIKKEDYYEVNSKCYKEAKKLKQISDQAEFIASFYNNDLIKVNGELYRIIGVNNDLLNRIEVNMVDITYKEYLETMNDKRTPRIFKAITGKTQSIKKYSTDILGNLYEVKSKQNPQMIMKR

SEQ ID NO: 310 - RNA, 17 nt, Staphylococcus sp.
guuuuaguacucuguaa

SEQ ID NO: 311 - RNA, 64 nt, Staphylococcus sp.
uuacagaaucuacuaaaacaagacuauauaucguguuuaucccaucaauuuauugaugggauuu

SEQ ID NO: 312 - DNA, 5 bp, Artificial Sequence
  source: /note="Description of Artificial Sequence: Synthetic oligonucleotide"
  modified_base (1)..(2): a, c, t, g, unknown or other
nngrr

SEQ ID NO: 313 - protein, 1052 aa, Staphylococcus sp.
MVTKYILGLDIGITSVGYGIINYEDKTIIDAGVRLFPEANVENNEGRRSKRGARRLKRRRIHRLDRIKQLLSEYNLVDLDNIPQSPSPYEIRVKGLREELSKDELVIALLHIAKRRGIHNVEAVDETQDEGNELSTKEQLAKNNNLLKDKYVCELLLERLKDGKVRGEKNRFKTTDIIKEVKQLLETQKEAHQLDDDFINRYIDLIETRREYFEGPGKGSPFGWGGDLKKWYETLMGHCTYFPNELRSVKYSYSADLFNALNDLNNLVIQREGNSKLEYHEKYHIIENVFKQKKKPTLKQIANEIGVSPDDIKGFRINKSGKETFTEFKLYHDLKKVLIDQSILENVQLLDQIAEILTIYQDKESIINELNQLSEIINEQDKESISNLSGYNGTHRLSLKCINLVIEELWHTSRNQMEIFTYLNIKPKKIDLAKTNKIPKNMIDEFILSPVVKRTFGQAINVINKVIEKYGVPEDIIIELARESNSKDKQKFINSLQKKNETTRKRINEIIGQYGNQNAKRLVEKIRLHDEQEGKCLYSLESIPLEDLINNPQYYEVDHIIPRSVSFDNSYQNKVLVKQTENSKKSNRTPYQYFNSGETKLSYNQFKQHVLNLSKSKDRISKKKKEYLLEERDINKYEVQKEFINRNLVDTRYATRELTNYLKAYFSANDMDVKVKTINGSFTDYLRKVWKFKKERNHGYKHHAEDALIIANADFLFKENKKLKKANAILEQPSLDNGKSDATVENDNEYVETFSIPKQVNDIKEFRDFKFSHRVDKKPNRQLINDTLYSTRKIENHTFIVSPITNIYSKDNDELKKKFNKNPEKFLMYQHDPKTFEKLEVIMKQYANEKNPLAKYHEETGEYLTKYSKKNNGPIVKTIKVLGDKVGKHLDVTHKYKYSNSKIVKKTINPYRFDVYLTDKGYKFITISYLDVLKKDNYYYILKEKYEELKIKKSISDTDQFIGSFYYNDLIKINDQIFKVVGVNNDLLNRIELDLLDISYKEYCKINNIKTNRIIKGITKKITNIEKFSTDVLGNLYKAHSNHPQLIFKQRD

SEQ ID NO: 314 - RNA, 17 nt, Staphylococcus sp.
guuuuaguacucuguaa

SEQ ID NO: 315 - RNA, 64 nt, Staphylococcus sp.; identical to SEQ ID NO: 311

SEQ ID NO: 316 - protein, 1129 aa, Streptococcus sp.
MSNGKILGLDIGVASVGVGIIDAKTGNVIHANSRLFSAANAENNAERRGFRGARRLTRRKKHRVKRVRDLFEKYDISTDFRNLNLNPYELRVKGLTEQLTNEELFAALRTIAKRRGISYLDDAEDDSTGSSDYAKSIDENRRLLKTKTPGQIQLERLEKYGQLRGNFTVYDENGEAHRLINVFSTSDYKNEARKILEAQSNYNKQITDEFIEDYIEILTQKRKYYHGPGNEKSRTDYGRFRTDGTTLENIFGILIGKCSFYPEEYRASKASYTAQEFNFLNDLNNLKVPTETGKLSTEQKEYLVDFAKKSKALGASKLLKEIAKIVDCSVDDIKGYRVDNKDKPDLHTFEPYRKLKFNLSSIDIDELSRETLDKLADILTLNTEREGIEDTIKRNLPSQFTEEQISEIVQIRKNQSSAFNKGWHSFSAKLMNELIPELYVTSEEQMTILTRLEKFKVNKKSSKNTKTIDEKEITDEIYNPVVAKSVRQTIKIINAAVKKYGDFDKIVIEMPRDKNAEDEKKFIDKKEKENKKEKDDSLKRAAFLYNGTDNLPDGVFHGNKELKTKIRLWYQQGERCLYSGKLISIHDLVHNSNKFEIDHILPLSLSFDDSLANKVLVYAWTNQEKGQKTPYQVIDSMDAAWSFREMKDYVLKQKRLGKKKREYLLTTENIDKIEVKKKFIERNLVDTRYASRVVLNSLQTALKELGKDTKVSVVRGQFTSQLRRKWNIDKSRETYHHHAVDALIIAASSQLKLWQKQENPMFESYGENQVVNKETGEILSISDDKYKELVFQPPYQGFVNTISSKGFEDEILFSYQVDSKFNRKVSDATIYSTRKAKLGKDKKDETYVLGKIKDIYSQDGFDTFIKRYKKDKTQFLMYQKDPLTWENVIEVILRDYPSEKLSEDGKKTVKCNPFEEYRRENGLICKYSKKGNGTPIKSLKYYDKKLGNCIDITPEKSKNRVVLRQISPWRADIYFNLETLKYELMGLKYSDLSFEKGTGKYHISQEKYDAIREKEGIGKKSEFKFTLYRNDLILIKDTLNNCERMLRFGSKNDTSKHYVELKPLEKGTFDSEEEILPVLGKVAKSGQFIKGLNKTNISIYKVRTDVLGNKFFIKKEGDKPKLDFKNNNK

SEQ ID NO: 317 - RNA, 16 nt, Streptococcus sp.
guauuuguacucucaa

SEQ ID NO: 318 - RNA, 68 nt, Streptococcus sp.
uugcagagccuacaaauauaaggcuucaugccgaauucaagcaccccauguuuacauggggugcuuuu

SEQ ID NO: 319 - DNA, 6 bp, Artificial Sequence
  source: /note="Description of Artificial Sequence: Synthetic oligonucleotide"
  modified_base (1)..(3): a, c, t, g, unknown or other
nnnaaa

SEQ ID NO: 320 - protein, 1359 aa, Pediococcus sp.
MEKVPYNIGLDIGTSSIGFAATDNLNKPIRAKGKTVIGVRLFEEGKTAADRRGFRTTRRRLSRRKWRLRLLDEIFDKEMAKVDNTFFARLKESNLSPKDANKKYLGSLLFPEKKDFKFYEDYPTIYHLRYALMHEKRQFDIREVYLAMHHIIKYRGNFLNSAPMNSFKTQDFDFVAKFKKLNELFESIDAEHETKFDIENISKFRDIMLNQDIRKLDRKKQAAKILILDSTDKTAKKINNKIATAVANSALGYKFALDAILKLDVEESKDWSISLNDEEIDSILDNLTSDLDAERIEIIEILRDLYSHIALNEIVPNGQSLSKSMMDKYDKHHADLDVLKKVISNMDDRKKAKSLKNIYNQYVGKTNDKVLDKDEFYKQIQKNLDKSEDAMKIVNEIELDQFMPKQRTSQNGVIPHQLHQKELDEIIENQKQYYPFLAEPNPNEKRKPHAQFKLDELIAFKIPYYVGPLITKEEQQAQSGAKFAWMKRKQDGVITPWNFDEKVDRMASANEFIRRMTTKDTYLLGEDVLPDESLIYQKFKVLNELNNVKVNDKKLTVADKQDIFNDLFKKQKTVSVSKLQKYFVTEKHYLTEPTIKGLSDTKKFSNSLSTYIDFEKIFGNEILADQNKQNDLEKIIEWSTIFEDRKIFEDKLHEIEWLTEKQIKAIRRYRGWGRLSKKLLVDLRNNEGKSILDELWRTNDNFMQIQAREEFAKSIVEANQKLMNLGGAASVQNTVESTLEDAYTSPQNKKAIRQVIKVVEDIVKAVGYAPEKITIEFTRGADKNSRRTQNRQKQIMEVYKTAAKEIVDATLKGQLENEEKLTDKLYLYFTQLGKDIYSGETINIDQLNNYDIDHILPQAFIKDDSLDNRVLTSRDLNNGKSDSVPVKQFGANMKSFWMRLQAHGLISKRKLNNLMTDPDSIGKYTMQGFVRRQLVETSQVIKLTANILGAVYGENTDIVEIPAKLTHQMREKFNLYKVREVNDYHHAFDAYLTTFVGNYLFKRYPKLRPYFVYGDFKMTDNALKGMRRFNFLHDLKDDEVLVDNETGEVLWEGQKSIEELKKIYGYKFMLTTHEAYINNGAMYDQTVYPAKSNKKLIPSKNNRPTNIYGGFSGNKDAYLAIVKILGKKGDTYKVVGVPRRFSDELLNAYNDDYSEYLNKLHDVLVTQFTKKQRNKKTGKIIKKIENFEIVVGKVNYRQRIIDRNQSFMLGSSTYKYNTKQLVLTESSMKILSNFKHASDDNLNLVYDEILEKVNESFELYDKNGFRKKLNNNIDKFRKLPCKSIFEKNKLISVGKCEILFQILNGLHANATMGDLKGIGFSTPFGFMQDASGIKLNKDSMLLYQSPTGLFERKVKLSDL

SEQ ID NO: 321 - RNA, 14 nt, Pediococcus sp.
guuucagaagagug

SEQ ID NO: 322 - RNA, 111 nt, Pediococcus sp.
cauucuguuuugaaaucaaacaacgcuuuacgcggaguuuacacaucugucccauuauaugggcauuacauaauaaaagaggaaucaccuuuaagguugauuccucuuuuu

SEQ ID NO: 323 - DNA, 5 bp, Artificial Sequence
  source: /note="Description of Artificial Sequence: Synthetic oligonucleotide"
  modified_base (1)..(2): a, c, t, g, unknown or other
nnaaa

SEQ ID NO: 324 - protein, 1488 aa, Weissella sp.
MAKQKYTVGLDIGTNSVGWAVINKDFKLVSGKKHINDNGKQKRSRTNLWGVRLFDAADTAADRRLKRGMRRRIARRKERLNYLRGIFQADILAFDDSFFIRMDESFLQDDDKQATAFSYRDQSGAMQTRVVTEKEAVKYPLFNGKSGSGETYTDESAYYNQYPTIYHLRQRLIDNPAQADLRLVYLAMHHILKYRGHFVNQGQTFDLGNINIAGNLTSALDKLDEASSFKFGLADVDADQANAILKNKQWSASKKAYELNTLYEIIQDTVYRRENETQAVAYDSLTVKQQEKWLAEKQKQVKAFLTGIVGNTISPKDIFANKDYDRKQNEDFPEKIKYSNENFEEQIGELEKYLDETEVAAIVAGKDVYESLVLSNILTKSTLSGSMIEKYNVHGTQLKSLKSFSRKVSAEFYDKLFNVVKDEKGKPQIGVYAQYIDGVGNPAKRLAREDFYDALKKVFESEFKGLTFPAGEKGIDFTKTDLSADRMAFIREMNEAINLENYLPKQRQADNGAIPYQVHEHELIRIIENQKQYYPFLGDKVQVTYEDESGQTQVRSEYKIQVLFKFRIPYYVGTLAKNSGWVNEDGKKLVARNVAAKNSWVVRNSDERVTPWNFEQVINKEASSINFIERMTNFDTYLPNEKVLPKNSLLYQEFIVNNELISSGYYLNGRKEYFLPEQRQRIITRLFKRYRKVSAKQMLDFLKNEYQIKLDDDPKKLFGLDTFVKVPSYNGSLSTVVDLTNKMGISEDLIANYPERFEEIIKWQTIFEDKKILKKTIREVNHNKWSGMLTAEQVNKLSKRHYTGWGRLSQKLLDGVKTSQGRTIIESLREGICDNFMRLIEDEKIAEFIANAQVAGAKDGVLAYDLVDQLPGSPAIKKGIWQSLRVLQELEHYLGRDAIGKVVIEMSRDDESSRRTKARKQQLEEFYKKFKESTGSDVTAELKRELSEKDAKEIDDEKVFLYFLQNGKSMYSGDQLYLSRLADYQVDHIVPQTYIKDDSLDNKVLVTQRDNQNKGGDTPSHTVVTRMNSYWDMLAKNGQVSPRKLANLKKGTITLKQREGFINRQLVENRQIIKHVANILTNYYTGTDTLVLTPKSGLTSQLRSGLIYELNPAFDEAKALDRGKAYQVERYTTVKLHDRFVKNRKLNDYHHAHDAYLNAFVAQYVYQEHPEWKNAWVYGKYPRNGQADFGKWATQRKQKSLQLLSSMANDVWNLEDPDTMEKTILNRDETFEQMRQTLCYRNINIVKKLETQTGKFGDESVYKKGNKADHYSLGLKRKYPPQKYGGTKGAISAVTALVKDNSGRVIPVSISASDYDSYQNASDKLAWLLMRKKNIAEILVASLPKYTKYELPSGALRLLASYQEAQSAVELPMLNLGLMDDEAKVLNLYDQLAQFIADNKLFTDKKIALLKGEMRVAFEGLEEFKDKQKVIDELLGVTNGSNQGLQALNSIGLGTSNQRLKSGNTMTNGVTLINESVTGLYSTRTTYN

SEQ ID NO: 325 - RNA, 22 nt, Weissella sp.
guuuuagugucauguugaauag

SEQ ID NO: 326 - RNA, 70 nt, Weissella sp.
cuauucaacauggcaaguuaaaauaagcuuuaugcguauucaaacuuuuguuaaggcgacaucgccuuuu

SEQ ID NO: 327 - DNA, 3 bp, Artificial Sequence
  source: /note="Description of Artificial Sequence: Synthetic oligonucleotide"
  modified_base (1)..(1): a, c, t, g, unknown or other
nag

SEQ ID NO: 328 - protein, 1337 aa, Enterococcus sp.
MKKDYVIGLDIGTNSVGWAVMTEDYQLVKKKMPIYGNTEKKKIKKNFWGVRLFEEGHTAEDRRLKRTARRRISRRRNRLRYLQAFFEEAMTALDENFFARLQESFLVPEDKKWHRHPIFAKLEDEVAYHETYPTIYHLRKKLADSSEQADLRLIYLALAHIVKYRGHFLIEGKLSTENISVKEQFQQFMIIYNQTFVNGESRLVSAPLPESVLIEEELTEKASRTKKSEKVLQQFPQEKANGLFGQFLKLMVGNKADFKKVFGLEEEAKITYASESYEEDLEGILAKVGDEYSDVFLAAKNVYDAVELSTILADSDKKSHAKLSSSMIVRFTEHQEDLKNFKRFIRENCPDEYDNLFKNEQKDGYAGYIAHAGKVSQLKFYQYVKKIIQDIAGAEYFLEKIAQENFLRKQRTFDNGVIPHQIHLAELQAIIHRQAAYYPFLKENQKKIEQLVTFRIPYYVGPLSKGDASTFAWLKRQSEEPIRPWNLQETVDLDQSATAFIERMTNFDTYLPSEKVLPKHSLLYEKFMVFNELTKISYTDDRGIKANFSGKEKEKIFDYLFKTRRKVKKKDIIQFYRNEYNTEIVTLSGLEEDQFNASFSTYQDLLKCGLTRAELDHPDNAEKLEDIIKILTIFEDRQRIRTQLSTFKGQFSEEVLKKLERKHYTGWGRLSKKLINGIYDKESGKTILDYLIKDDGVSKHYNRNFMQLINDSQLSFKNAIQKAQSSEHEETLSETVNELAGSPAIKKGIYQSLKIVDELVAIMGYAPKRIVVEMARENQTTSTGKRRSIQRLKIVEKAMAEIGSNLLKEQPTTNEQLRDTRLFLYYMQNGKDMYTGDELSLHRLSHYDIDHIIPQSFMKDDSLDNLVLVGSTENRGKSDDVPSKEVVKKMKAYWEKLYAAGLISQRKFQRLTKGEQGGLTLEDKAHFIQRQLVETRQITKNVAGILDQRYNAKSKEKKVQIITLKASLTSQFRSIFGLYKVREVNDYHHGQDAYLNCVVATTLLKVYPNLAPEFVYGEYPKFQAFKENKATAKAIIYTNLLRFFTEDEPRFTKDGEILWSNSYLKTIKKELNYHQMNIVKKVEVQKGGFSKESIKPKGPSNKLIPVKNGLDPQKYGGFDSPVVAYTVLFTHEKGKKPLIKQEILGITIMEKTRFEQNPILFLEEKGFLRPRVLMKLPKYTLYEFPEGRRRLLASAKEAQKGNQMVLPEHLLTLLYHAKQCLLPNQSESLAYVEQHQPEFQEILERVVDFAEVHTLAKSKVQQIVKLFEANQTADVKEIAASFIQLMQFNAMGAPSTFKFFQKDIERARYTSIKEIFDATIIYQSTTGLYETRRKVVD

SEQ ID NO: 329 - RNA, 17 nt, Enterococcus sp.
guuuuagagucauguug

SEQ ID NO: 330 - RNA, 68 nt, Enterococcus sp.
caacauagcaaguuaaaauaagguuuuaaccguaaucaacuguaaaguggcgcuguuucggcgcuuuu

SEQ ID NO: 331 - DNA, 3 bp, Artificial Sequence
  source: /note="Description of Artificial Sequence: Synthetic oligonucleotide"
  modified_base (1)..(1): a, c, t, g, unknown or other
ngg

SEQ ID NO: 332 - protein, 1340 aa, Enterococcus sp.
MKKEYTIGLDIGTNSVGWSVLTDDYRLVSKKMKVAGNTEKSSTKKNFWGVRLFDEGQTAEARRSKRTARRRLARRRQRILELQKIFAPEILKIDEHFFARLNESFLVPDEKKQSRHPVFATIKQEKSYHQTYPTIYHLRQALADSSEKADIRLVYLAMAHLLKYRGHFLIEGELNTENSSVTETFRQFLSTYNQQFSEAGDKQTEKLDEAVDCSFVFTEKMSKTKKAETLLKYFPHEKSNGYLSQFIKLMVGNQGNFKNVFGLEEEAKLQFSKETYEEDLQELLEKIGDDYIDLFVQAKNVYDAVLLSEILSDSTKNTRAKLSAGMIRRYDAHKEDLVLLKRFVKENLPKKYRAFFGDNSVNGYAGYIEGHATQEDFYKFVKKELTGIRGSEVFLTKIEQENFLRKQRTFDNGVIPHQIHLTELRAIIANQKKHYPFLKEEQEKLESLLTFKIPYYVGPLAKKQENSPFAWLIRKSEEKIKPWNLPEIVDMEDSAVRFIERMINTDMYMPHNKVLPKNSLLYQKFSIYNELTKVRYQDERGQMNYFSSIEKKEIFHELFEKNRKVTKKDLQEFLYLKYDIKHAELSGIEKAFNASYTTYHDFLTMSENKREMKQWLEDPELASMFEEIIKTLTVFEDREMIKTRLSHHEATLGKHIIKKLTKKHYTGWGRLSKELIQGIRDKQSNKTILDYLINDDDFPHHRNRNFMQLINDDSLSFKKEIKKAQMITDTENLEEIVKELTGSPAIKKGILQSLKIVDEIVGIMGYEPANIVVEMARENQTTGRGLKSSRPRLKALEESLKDFGSQLLKEYPTDNSSLQKDRLYLYYLQNGRDMYTGAPLDIHRLSDYDIDHIIPRSFTTDNSIDNKVLVSSKENRLKKDDVPSEKVVKKMRSFWYDLYSSKLISKRKLDNLTKIKLTEEDKAGFIKRQLVETRQITKHVAGILHHRFNKAEDTNEPIRKVRIITLKSALVSQFRNRFGIYKVREINEYHHAHDAYLNGVIALALLKKYPQLAPEFVYGEYLKFNAHKANKATVKKEFYSNIMKFFESDTPVCDENGEIFWDKSKSIAQVKKVINHHHMNIVKKTEIQKGGFSKETVEPKKDSSKLLPRKNNWDPAKYGGLGSPNVAYTVAFTYEKGKARKRTNALEGITIMEREAFEQSPVLFLKNKGYEQAEIEMKLPKYALFELENGRKRMVASNKEAQKANSFLLPEHLVTLLYHAKQYDEISHKESFDYVNEHHKEFSEVFARVLEFAGKYTLAEKNIEKLEKIYKENQTDDLAKLASSFVNLMQFNAMGAPADFKFFDVTIPRKRYTSLTEIWQSTIIHQSITGLYETRIRMGK

SEQ ID NO: 333 - RNA, 15 nt, Enterococcus sp.
guuuuagagcuaugc

SEQ ID NO: 334 - RNA, 70 nt, Enterococcus sp.
gcauagcaaguuaaaauaaggcuuuguccgucaucagcuuuuuuaaagcagcgcuguucucggcgcuuuu

SEQ ID NO: 335 - protein, 1327 aa, Enterococcus sp.
MKKNYTIGLDIGTASVGWAVLTEDYDLVKRKMKISGNTQKKAVKKNFWGVRLFEQGETAEGRRLKRTTRRRIARRRQRIQYLRTIFDEAMNQVDANFFARLDESFSITDEKENERHPIFGNVAEEVAYHEQFRTIYRLREVLANSSEQADLRLIYLALAHIIKFRGHFLIEGELNTENSSVSGTFEQFIKVYNETFNVEKVLELTVDLDEIAKQKVSRMKRAELILSLFPEEKSTGDFAQFIKMIVGNQGNVKKTFSLNEDAKIQFSKEEYEENLETLLAEIGEDFRGVFDAAKSVYDAISLANILKVTDAATRAKLSSSMVARFKEHKEDLKALKQFVRDNLPDEYDDLFKNKKVAGYAGYIDGDATQEEFYKYLKKALAKTTGAEYFLAKIEQEDFLRKQRTFDNGVIPYQLHLEELKAIIRNQKPYYPFLDEEKISQLMTFRIPYYVGPLAQGQGNFAWLTRKESGKITPWNLNEKVDIEKSATDFVERMTNNDSYLPMEKVLPKHSLLYEKFTVYNELTKVRYMDDNGRVQNFSSKEKQQIVNDLFKQQRKVKKEILEAFIKNEYGIENPKVEGIEKAFNASLGTYHDLVKLGIRPALFEQPEYEQQFEQIVKILTVFEDRKMRRKQLEQFSDLLTEDEQKQLERKHYKGWGRLSAKLIHGIVDQKTQKTILDYLIDDDDLPRNRNRNFMQLINDENLSFKEEIEKIAFDNDKSTEEIVQELAGSPAIKKGILQSLKIVEEIIEIMGELPTNIVVEMARENQTTAQGNRASQARMKYLEESIKKLGSSILEDEPISKDANLLRNDRLFLYYLQNGRDMYTGDELDINNLSSYDIDHIIPQSFVKDDSIDNRVLTTQRINRGKSNTVPAESVVKDMRATWERLYASNLISKKKLNNLMKAVNGGLTEEDKAYFIQRQLVETRQITKNVAQILHQKYNNEQSSEKPVRVVTLKSALASQFRKDFSLYKIRELNDYHHAQDAYLNGVIAQALLKVYPKLEPEFVYGEYQKVSIRALNKATAKKETYSNIMKFFTNDEVLTNKETGEVLWNRQRDIKTIKKVMNYHQMNIVKKVEIQTGRFTKESIQPKGPSKKLIARKNNWAPVNYGGFDSPTVAYSVIITHEKGKAAKVVQQLVGIKILERQAFEQNEVAFLEGKGFIHPKVQLKLPKYSLYQFADGRRRLLASADEAQKGNQMVLPTELIELLYHAKHVNDSSGESLTYLENHRTKFAELLEVILQFTNRYVGAEDRQKTVRDLYEKNQDADMKELAPSFVQLLQLNKQGAPASFKFFGETIERSRYKNMTELNKATFINQSITGLYETQRRLV

SEQ ID NO: 336 - RNA, 15 nt, Enterococcus sp.
guuuuagagcuaugc

SEQ ID NO: 337 - RNA, 66 nt, Enterococcus sp.
gcauagcaaguuaaaauaaggcuuaguccguaaacaaacuuuggcacuguauucggugcuuuuuuu

SEQ ID NO: 338 - protein, 1150 aa, Artificial Sequence
  source: /note="Description of Artificial Sequence: Synthetic polypeptide"
MYSIGLDLGISSVGWSVIDEETGKIVDLGIRLFSAKNSEKNLERRTSRGARRLIRRKTNRLKDAKKLLEAIGFYEDKALKNVCPYQLRVKGLTEGLTKGELYKVVLHIVKKRGISYLDEDDAEAAKESQDYKEQVRKNAQLLTKYTPGQIQLQRLKENNRVKTGINGQGHYQLNVFKVSAYADELATILKTQQALYPNELTDDWIALFVQPGIAENAGLIYRKRPYYHGPGNEANNSPYGRWSDFQKTGQPAANIFDKLIGKDFQGELRASGLSLSAQQYNLLNDLTNLKIDGEVSLSPTQKEFILTELMTKEFARFGVNDIAKLLGVKKEQLSGWRLDKKGKPEIHTLKGYRNWRKIFAESGIDLATLPTETIDCLAKVLTLNTEREGVENTLAFELPELAEPVKLLVLDRYKELSQSVSTQAWHRFSLKTLHLLIPELIKSTSEQNTLLEQFQLKADVRKRYSDYKKLPTKEVLTEIYNPTVNKTVSQAFKVMDALLEKYGKDQIHYITVEMPRDDNEEEERKRIKELQTKNSQRKNDSQQYFLQKSGWSQEKFQATIHKNRRFLAKLLYYFEQDGVCAYTGNPISPELLVSDSTEIDHIIPISISLDDSINNKVLVLSHANQVKGQQTPYDARMAGAFNKINGKFSNWDEYQKWVESCPFSRKKVNNLLETRNIFDSEQVQKFLSRNLNDTRYASRLVLNTLQSFFENQDTIVRVVNGSFTHTLRKKWGADLDKTRETHHHHAIDASLCAVTPFVKVSRYHYAVNEETGEKFMREIDVETGEILDEIPYREYKKAKHYERKTYQVKWSNFREQLKPITIHPKIKFSHQVDRKANRKLSDATIYSVREKTEVKTLKSGKEKITTDEYTIGKIKDIYTVDGWEAFKKKQDKLLMKEFDEKTYELLVTIAATTPDFQEVEEKNGKVKRVKRSPFAVYCEENGIPAIRKYAKKNNGPVIRSLKYYDGKLNKHINITKDEKGRPVEQTKNGRKVTLQSLKPYRYDIYQDLETKAYYTVQLYYSDLRFVEGEYGITEKEYMKKVAEQTKGQVVRFCFSLQKNDGLEIEWKDSQRYDVRFYNFQSANSINFKGLEQEMIPAENQFKQKPYNNGAINLNIAKYGKEGNKLRKFNTDILGKKHHLSYEKEPKNIIK

SEQ ID NO: 339 - protein, 1150 aa, Artificial Sequence
  source: /note="Description of Artificial Sequence: Synthetic polypeptide"
MYSIGLDLGISSVGWSVIDEETGKIVDLGIRLFSAKNSDNNEGRRSKRGSRRLKRRRIHRLERVKLLLTEYDLINKEQIPTVCPYQLRVKGLTEGLTKGELYKVVLHIVKKRGISYLDEDDAEAAKESQDYKEQVRKNAQLLTKYTPGQIQLQRLKENNRVKTGINGQGHYQLNVFKVSAYADELATILKTQQALYPNELTDDWIALFVQPGIAENAGLIYRKRPYYHGPGNEANNSPYGRWSDFQKTGQPAANIFDKLIGKDFQGELRASGLSLSAQQYNLLNDLNNLIIDGEVSLSPTQKEFILTELMTKEFARFGVNDIAKLLGVKKEQLSGWRLDKKGKPEIHTLKGYRNWRKIFAESGIDLATLPTETIDCLAKVLTLNTEREGVENTLAFELPELAEPVKLLVLDRYKELSQSVSTQAWHRLSLKCIHLINEELIKSTSEQNTLLEQFQLKADVRKRYSDYKKLPTKEVLTEIYNPTVNKTVSQAFKVMDALLEKYGKDQIHYITVEMPRDDNEEEERKRIKELQTKNSQRKNDSQQYFLQKSGWSQEKFQATIHKNRRFLAKLLYYFEQDGVCAYTGNPISPELLVSDSTEVDHIIPRSISLDDSINNKVLVLSHANQVKGQQTPYDARMAGAFNKINGKFSNWDEYQKWVESCPFSRKKVNNLLETRNIFDSEQVQKFLSRNLVDTRYATRLVLNTLQSFFENQDTIVRVVNGSFTHTLRKKWGADLDKTRETHHHHAVDATLCAVTPFVKVSRYHYAVNEETGEKFMREIDVETGEILDEIPYREYKKAKHYERKTYQVKWSNFREQLKPITIHPKIKFSHRVDKKPNRQLINDTLYSTRMKDEVKTLKSGKEKITTDEYTIGKITDIYTVDGWEAFKKKQDKLLMKEFDEKTYELLVTIAATTPDFQEVEEKNGKVKRVKRSPFAVYCEENGIPAIRKYAKKNNGPVIRSLKYYDGKLNKHINITKDEKGRPVEQTKNGRKVTLQSLKPYRYDIYQDLETKAYYTVQLYYSDLRFVEGEYGITEKEYMKKVAEQTKGQVVRFCFSLQKNDGLEIEWKDSQRYDVRFYNFQSANSINFKGLEQEMIPAENQFKQKPYNNGAINLNIAKYGKEGNKLRKFTTDVLGKKHHLSYEKEPKNIIK

SEQ ID NO: 340 - protein, 1150 aa, Artificial Sequence
  source: /note="Description of Artificial Sequence: Synthetic polypeptide"
MYSIGLDLGISSVGWSVIDEETGKIVDLGARLFSAKNSEKNLERRTSRGARRLIRRKTNRLKDAKKLLEAIGFYEDKALKNVCPYQLRVKGLTEGLTKGELYKVVLHIVKKRGISYLDEDDAEAAKESQDYKEQVRKNAQLLTKYTPGQIQLQRLKENNRVKTGINGQGHYQLNVFKVSAYADELATILKTQQALYPNELTDDWIALFVQPGIAENAGLIYRKRPYYHGPGNEANNSPYGRWSDFQKTGQPAANIFDKLIGKDFQGELRASGLSLSAQQYNLLNDLTNLKIDGEVSLSPDQKEFILTELMTKEFARFGVNDIAKLLGVKKEQLSGWRLDKKGKPEIHTLKGYRNWRKIFAEVGIDLATLPTETIDCLAKVLTLNTEREGVENTLAFELPELAEPVKTLVLDRYKELSQSLSTQAWHRFSLKTLHLLIPELIKSTSEQNTLLEQFQLKAAVRKRYSDYKKLPTKEVLVEIYNPTVNKTVSQAFKVMDALLEKYGKDQIHYITVEMPRDDNEEEERKRIKELQTKNSQRKNDSQQYFLQKSGWSQEKFQATIHKNRRFLAKLLYYFEQDGVCAYTGNPISPELLVSDSTEIDHIIPISISLDDSINNKVLVLSHANQVKGQQTPYDARMAGAFNKINGKFSNWDEYQKWVESKPFSRKKVNNLLETRNIFDSEQVQKFLSRNLNDTRYASRLVLNTLQSFFENQDTIVRVVNGSFTHTLRKKWGADLDKTRETHHHHAVDATLCAVTPFVKVSRYHYAVNEETGEKFMREIDVETGEILDEIPYREYKKAKHYERKTYQVKWSNFREQLKPITIHPKIKFSHQVDRKANRKLSDATIYSVREKTEVKTLKSGKEKITTDEYTIGKIKDIYTVDGWEAFKKKQDKLLMKEFDEKTYELLVTIAATTPDFQEVEEKNGKVKRVKRSPFAVYCEENGIPAIRKYAKKNNGPVIRSLKYYDGKLNKHINITKDEKGRPVEQTKNGRKVTLQSLKPYRYDIYQDLETKAYYTVQLYYSDLRFVEGEYGITEKEYMKKVAEQTKGQVVRFCFSLQKNDGLEIEWKDSQRYDVRFYNFQSANSINFKGLEQEMIPAENQFKQKPYNNGAINLNIAKYGKEGRKLRKFNTDILGKKHHLSYEKEPKNIIK

SEQ ID NO: 341 - protein, 1150 aa, Artificial Sequence
  source: /note="Description of Artificial Sequence: Synthetic polypeptide"
MYSIGLDLGISSVGWSVIDEETGKIVDLGARLFSAKNSEKNLERRTSRGARRLIRRKTNRLKDAKKLLEAIGFYEDKALKNVCPYQLRVKGLTEGLTKGELYKVVLHIVKKRGISYLDEDDAEAAKESQDYKEQVRKNAQLLTKYTPGQIQLQRLKENNRVKTGINGQGHYQLNVFKATAYADEIASLIKSQQAIYPNEISDDWLALFAQPGIAENAGLIYRKRPYYHGPGNEANNSPYGRWSDFQKTGQPAANIFDKLIGKDFQGELRASGLSLSAQQYNLLNDLTNLKIDGEVSLSPDQKEFLISEIMSKEFARFGANDLAKIIGAKKEQLSGWRLDKKGKPEIHTLKGYRNWRKIFAEVGLDIASIPSESLDCIAKVLTLNTEREGAENSIAFEIPEIAEPAKTIAIDRYKEITQTLSTQAWHRFSLKTLHLLIPELIKSTSEQNTLLEQFQLKAAVRKRYSDYKKLPTKEVLVEIYNPTVNKTVSQAFKVMDALLEKYGKDQIHYITVEMPRDDNEEEERKRIKELQTKNSQRKNDSQQYFLQKSGWSQEKFQATIHKNRRFLAKLLYYFEQDGVCAYTGNPISPELLVSDSTEIDHIIPISISLDDSINNKVLVLSHANQVKGQQTPYDARMAGAFNKINGKFSNWDEYQKWVESKPFSRKKVNNLLETRNIFDSEQVQKFLSRNLNDTRYASRLVLNTLQSFFENQDTIVRVVNGSFTHTLRKKWGADLDKTRETHHHHAVDATLCAVTPFVKVSRYHYAVNEETGEKFMREIDVETGEILDEIPYREYKKAKHYERKTYQVKWSNFREQLKPITIHPKIKFSHQVDRKANRKLSDATIYSVREKTEVKTLKSGKEKITTDEYTIGKIKDIYTVDGWEAFKKKQDKLLMKEFDEKTYELLVTIAATTPDFQEVEEKNGKVKRVKRSPFAVYCEENGIPAIRKYAKKNNGPVIRSLKYYDGKLNKHINITKDEKGRPVEQTKNGRKVTLQSLKPYRYDIYQDLETKAYYTVQLYYSDLRFVEGEYGITEKEYMKKVAEQTKGQVVRFCFSLQKNDGLEIEWKDSQRYDVRFYNFQSANSINFKGLEQEMIPAENQFKQKPYNNGAINLNIAKYGKEGRKLRKFNTDILGKKHHLSYEKEPKNIIK

SEQ ID NO: 342 - protein, 1150 aa, Artificial Sequence
  source: /note="Description of Artificial Sequence: Synthetic polypeptide"
MYSIGLDLGISSVGWSVIDEETGKIVDLGVRLFSAKNSEKNLERRTSRGARRLIRRKTNRLKDAKKLLEAIGFYEDKALKNVCPYQLRVKGLTEGLTKGELYKVVLHIVKKRGISYLDEDDAEAAKESQDYKEQVRKNAQLLTKYTPGQIQLQRLKENNRVKTGINGQGHYQLNVFKASAYADELATLLKTQQALYPNEITDDWLALFVQPGIAENAGLIYRKRPYYHGPGNEANNSPYGRWSDFQKTGQPAANIFDKLIGKDFQGELRASGLSLSAQQYNLLNDLTNLKIDGEVSLSPEQKEFLLTELMTKEFARFGVNDIAKLLGAKKEQLSGWRLDKKGKPEIHTLKGYRNWRKIFAEAGIDIASLPTETLDCLAKVLTLNTEREGVENSLAFELPELAEPVKSLVLDHYKELSQSISTQAWHRFSLKTLHLLIPELIKSTSEQNTLLEQFQLKAGVRKRYSDYKKLPTKEVLAEIYNPTVNKTVSQAFKVMDALLEKYGKDQIHYITVEMPRDDNEEEERKRIKELQTKNSQRKNDSQQYFLQKSGWSQEKFQATIHKNRRFLAKLLYYFEQDGVCAYTGNPISPELLVSDSTEIDHIIPISISLDDSINNKVLVLSHANQVKGQQTPYDARMAGAFNKINGKFSNWDEYQKWVESRPFSRKKVNNLLETRNIFDSEQVQKFLSRNLNDTRYASRLVLNTLQSFFENQDTIVRVVNGSFTHTLRKKWGADLDKTRETHHHHAVDATLCAVTPFVKVSRYHYAVNEETGEKFMREIDVETGEILDEIPYREYKKAKHYERKTYQVKWSNFREQLKPITIHPKIKFSHQVDRKANRKLSDATIYSVREKTEVKTLKSGKEKITTDEYTIGKIKDIYTVDGWEAFKKKQDKLLMKEFDEKTYELLVTIAATTPDFQEVEEKNGKVKRVKRSPFAVYCEENGIPAIRKYAKKNNGPVIRSLKYYDGKLNKHINITKDEKGRPVEQTKNGRKVTLQSLKPYRYDIYQDLETKAYYTVQLYYSDLRFVEGEYGITEKEYMKKVAEQTKGQVVRFCFSLQKNDGLEIEWKDSQRYDVRFYNFQSANSINFKGLEQEMIPAENQFKQKPYNNGAINLNIAKYGKEGKKLRKFNTDILGKKHHLSYEKEPKNIIK

SEQ ID NO: 343 - protein, 1150 aa, Artificial Sequence
  source: /note="Description of Artificial Sequence: Synthetic polypeptide"
MYSIGLDLGISSVGWSVIDEETGKIVDLGVRLFSAKNSEKNLERRTSRGARRLIRRKTNRLKDAKKLLEAIGFYEDKALKNVCPYQLRVKGLTEGLTKGELYKVVLHIVKKRGISYLDEDDAEAAKESQDYKEQVRKNAQLLTKYTPGQIQLQRLKENNRVKTGINGQGHYQLNVFKVTAYADELATILKTQQAIYPNEITDDWIAIFVQPGIAENAGLIYRKRPYYHGPGNEANNSPYGRWSDFQKTGQPAANIFDKLIGKDFQGELRASGLSLSAQQYNLLNDLTNLKIDGEVSLSPEQKEFILTELMTKEFARFGANDIAKILGAKKEQLSGWRLDKKGKPEIHTLKGYRNWRKIFAEAGIDIATLPTETIDCLAKVLTLNTEREGAENTLAFELPELAEPAKTLVLDHYKELTQSISTQAWHRFSLKTLHLLIPELIKSTSEQNTLLEQFQLKAGVRKRYSDYKKLPTKEVLAEIYNPTVNKTVSQAFKVMDALLEKYGKDQIHYITVEMPRDDNEEEERKRIKELQTKNSQRKNDSQQYFLQKSGWSQEKFQATIHKNRRFLAKLLYYFEQDGVCAYTGNPISPELLVSDSTEIDHIIPISISLDDSINNKVLVLSHANQVKGQQTPYDARMAGAFNKINGKFSNWDEYQKWVESRPFSRKKVNNLLETRNIFDSEQVQKFLSRNLNDTRYASRLVLNTLQSFFENQDTIVRVVNGSFTHTLRKKWGADLDKTRETHHHHAVDATLCAVTPFVKVSRYHYAVNEETGEKFMREIDVETGEILDEIPYREYKKAKHYERKTYQVKWSNFREQLKPITIHPKIKFSHQVDRKANRKLSDATIYSVREKTEVKTLKSGKEKITTDEYTIGKIKDIYTVDGWEAFKKKQDKLLMKEFDEKTYELLVTIAATTPDFQEVEEKNGKVKRVKRSPFAVYCEENGIPAIRKYAKKNNGPVIRSLKYYDGKLNKHINITKDEKGRPVEQTKNGRKVTLQSLKPYRYDIYQDLETKAYYTVQLYYSDLRFVEGEYGITEKEYMKKVAEQTKGQVVRFCFSLQKNDGLEIEWKDSQRYDVRFYNFQSANSINFKGLEQEMIPAENQFKQKPYNNGAINLNIAKYGKEGKKLRKFNTDILGKKHHLSYEKEPKNIIK

SEQ ID NO: 344 - protein, 1150 aa, Artificial Sequence
  source: /note="Description of Artificial Sequence: Synthetic polypeptide"
MYSIGLDLGISSVGWSVIDEETGKIVDLGVRLFSAKNSEKNLERRTSRGARRLIRRKTNRLKDAKKLLEAIGFYEDKALKNVCPYQLRVKGLTEGLTKGELYKVVLHIVKKRGISYLDEDDAEAAKESQDYKEQVRKNAQLLTKYTPGQIQLQRLKENNRVKTGINGQGHYQLNVFKVSAYADELASILKTQQALYPNEITDDWIAIFVQPGIAENAGLIYRKRPYYHGPGNEANNSPYGRWSDFQKTGQPAANIFDKLIGKDFQGELRASGLSLSAQQYNLLNDLTNLKIDGEVSLSPEQKEFIITELMTKEFARFGVNDLAKILGVKKEQLSGWRLDKKGKPEIHTLKGYRNWRKIFAEAGLDLATIPSETLDCLAKVLTLNTEREGAENTLAFELPELAEPVKTLVLDHYKELSQSISTQAWHRFSLKTLHLLIPELIKSTSEQNTLLEQFQLKAGVRKRYSDYKKLPTKEVLAEIYNPTVNKTVSQAFKVMDALLEKYGKDQIHYITVEMPRDDNEEEERKRIKELQTKNSQRKNDSQQYFLQKSGWSQEKFQATIHKNRRFLAKLLYYFEQDGVCAYTGNPISPELLVSDSTEIDHIIPISISLDDSINNKVLVLSHANQVKGQQTPYDARMAGAFNKINGKFSNWDEYQKWVESRPFSRKKVNNLLETRNIFDSEQVQKFLSRNLNDTRYASRLVLNTLQSFFENQDTIVRVVNGSFTHTLRKKWGADLDKTRETHHHHAVDATLCAVTPFVKVSRYHYAVNEETGEKFMREIDVETGEILDEIPYREYKKAKHYERKTYQVKWSNFREQLKPITIHPKIKFSHQVDRKANRKLSDATIYSVREKTEVKTLKSGKEKITTDEYTIGKIKDIYTVDGWEAFKKKQDKLLMKEFDEKTYELLVTIAATTPDFQEVEEKNGKVKRVKRSPFAVYCEENGIPAIRKYAKKNNGPVIRSLKYYDGKLNKHINITKDEKGRPVEQTKNGRKVTLQSLKPYRYDIYQDLETKAYYTVQLYYSDLRFVEGEYGITEKEYMKKVAEQTKGQVVRFCFSLQKNDGLEIEWKDSQRYDVRFYNFQSANSINFKGLEQEMIPAENQFKQKPYNNGAINLNIAKYGKEGKKLRKFNTDILGKKHHLSYEKEPKNIIK

SEQ ID NO: 345 - protein, 1150 aa, Artificial Sequence
  source: /note="Description of Artificial Sequence: Synthetic polypeptide"
MYSIGLDLGISSVGWSVIDEETGKIVDLGVRLFSAKNSEKNLERRTSRGARRLIRRKTNRLKDAKKLLEAIGFYEDKALKNVCPYQLRVKGLTEGLTKGELYKVVLHIVKKRGISYLDEDDAEAAKESQDYKEQVRKNAQLLTKYTPGQIQLQRLKENNRVKTGINGQGHYQLNVFKVTAYADEIASILKTQQAIYPNEITDDWIALFVQPGIAENAGLIYRKRPYYHGPGNEANNSPYGRWSDFQKTGQPAANIFDKLIGKDFQGELRASGLSLSAQQYNLLNDLTNLKIDGEVSLSPEQKEFIISELMTKEFARFGVNDLAKIIGVKKEQLSGWRLDKKGKPEIHTLKGYRNWRKIFAEAGIDLATLPSETLDCLAKVLTLNTEREGAENTLAFELPELAEPVKSLVLDHYKELSQTISTQAWHRFSLKTLHLLIPELIKSTSEQNTLLEQFQLKAGVRKRYSDYKKLPTKEVLAEIYNPTVNKTVSQAFKVMDALLEKYGKDQIHYITVEMPRDDNEEEERKRIKELQTKNSQRKNDSQQYFLQKSGWSQEKFQATIHKNRRFLAKLLYYFEQDGVCAYTGNPISPELLVSDSTEIDHIIPISISLDDSINNKVLVLSHANQVKGQQTPYDARMAGAFNKINGKFSNWDEYQKWVESRPFSRKKVNNLLETRNIFDSEQVQKFLSRNLNDTRYASRLVLNTLQSFFENQDTIVRVVNGSFTHTLRKKWGADLDKTRETHHHHAVDATLCAVTPFVKVSRYHYAVNEETGEKFMREIDVETGEILDEIPYREYKKAKHYERKTYQVKWSNFREQLKPITIHPKIKFSHQVDRKANRKLSDATIYSVREKTEVKTLKSGKEKITTDEYTIGKIKDIYTVDGWEAFKKKQDKLLMKEFDEKTYELLVTIAATTPDFQEVEEKNGKVKRVKRSPFAVYCEENGIPAIRKYAKKNNGPVIRSLKYYDGKLNKHINITKDEKGRPVEQTKNGRKVTLQSLKPYRYDIYQDLETKAYYTVQLYYSDLRFVEGEYGITEKEYMKKVAEQTKGQVVRFCFSLQKNDGLEIEWKDSQRYDVRFYNFQSANSINFKGLEQEMIPAENQFKQKPYNNGAINLNIAKYGKEGKKLRKFNTDILGKKHHLSYEKEPKNIIK

SEQ ID NO: 346 - protein, 1150 aa, Artificial Sequence
  source: /note="Description of Artificial Sequence: Synthetic polypeptide"
MYSIGLDLGISSVGWSVIDEETGKIVDLGVRLFSAKNSEKNLERRTSRGARRLIRRKTNRLKDAKKLLEAIGFYEDKALKNVCPYQLRVKGLTEGLTKGELYKVVLHIVKKRGISYLDEDDAEAAKESQDYKEQVRKNAQLLTKYTPGQIQLQRLKENNRVKTGINGQGHYQLNVFKASAYADEIASLLKTQQAIYPNELTDDWLALFVQPGIAENAGLIYRKRPYYHGPGNEANNSPYGRWSDFQKTGQPAANIFDKLIGKDFQGELRASGLSLSAQQYNLLNDLTNLKIDGEVSLSPEQKEFIISELMTKEFARFGANDIAKLLGVKKEQLSGWRLDKKGKPEIHTLKGYRNWRKIFAEAGLDLATLPTETIDCLAKVLTLNTEREGAENSLAFELPELAEPVKSLALDHYKELTQSISTQAWHRFSLKTLHLLIPELIKSTSEQNTLLEQFQLKAGVRKRYSDYKKLPTKEVLAEIYNPTVNKTVSQAFKVMDALLEKYGKDQIHYITVEMPRDDNEEEERKRIKELQTKNSQRKNDSQQYFLQKSGWSQEKFQATIHKNRRFLAKLLYYFEQDGVCAYTGNPISPELLVSDSTEIDHIIPISISLDDSINNKVLVLSHANQVKGQQTPYDARMAGAFNKINGKFSNWDEYQKWVESRPFSRKKVNNLLETRNIFDSEQVQKFLSRNLNDTRYASRLVLNTLQSFFENQDTIVRVVNGSFTHTLRKKWGADLDKTRETHHHHAVDATLCAVTPFVKVSRYHYAVNEETGEKFMREIDVETGEILDEIPYREYKKAKHYERKTYQVKWSNFREQLKPITIHPKIKFSHQVDRKANRKLSDATIYSVREKTEVKTLKSGKEKITTDEYTIGKIKDIYTVDGWEAFKKKQDKLLMKEFDEKTYELLVTIAATTPDFQEVEEKNGKVKRVKRSPFAVYCEENGIPAIRKYAKKNNGPVIRSLKYYDGKLNKHINITKDEKGRPVEQTKNGRKVTLQSLKPYRYDIYQDLETKAYYTVQLYYSDLRFVEGEYGITEKEYMKKVAEQTKGQVVRFCFSLQKNDGLEIEWKDSQRYDVRFYNFQSANSINFKGLEQEMIPAENQFKQKPYNNGAINLNIAKYGKEGKKLRKFNTDILGKKHHLSYEKEPKNIIK

SEQ ID NO: 347 - protein, 1150 aa, Enterococcus sp.; identical to SEQ ID NO: 302

SEQ ID NO: 348 - DNA, 300 bp, Artificial Sequence
  source: /note="Description of Artificial Sequence: Synthetic polynucleotide"
agctccacggcaagagaattcaaagccgcgggcctgggttccacgcggggccccttacccaaggtgccccgggcgctcatttgcatgtcccacccaacaggtaaacctgacaggtcagtcgcggccgggtacggcctggcggtcagagcaccaaacgtacgagccttgtgatgcggttccattgcatgaaattctcctaaaggccccaagatgaacgggaaagcgcgcggttcgctcaccgtaactaaaacaggtgagagactcccgtgccttataaggcctgtggacggaggcagttgc

SEQ ID NO: 349 - DNA, 300 bp, Artificial Sequence
  source: /note="Description of Artificial Sequence: Synthetic polynucleotide"
tgttctccgaacagtacttgtaatatacaggttccccgatccaccaccgtctgcgggtggcggtacagcctctcccagtgtgctttgcgctcatttgcatagagcacggcaccgaacgcagccactgtcccccgcgtccgctgtcccccgtgcaggccaaacccgggcgcggccccgccgacggtgggtacagagagtggtcggctcggcaccggctgctgcgcggcaccggcactcaccctgtccttatggagccctaactccatggctataaatatctaaggggaggaagggtagatc

SEQ ID NO: 350 - DNA, 300 bp, Artificial Sequence
  source: /note="Description of Artificial Sequence: Synthetic polynucleotide"
agcgctccgcggagacttctgggacgcggcggctccgactccgccccgcttccggcttatttgcatacagcaattcctagcaggccctgtgctgaatttagtcggaaaactaccatgttcagtcgaaaaagcaaatacttttgtcagatatggccaaaaacttcacttgacttagccgtgtttcatgtaaagcattaaaaggatggagtgattgttcaaatttcataagaagaattcaccttcagtttaaggtggttcgctttctgcacttcaaataccgcggtggacagaccctgtttc

SEQ ID NO: 351 - DNA, 300 bp, Artificial Sequence
  source: /note="Description of Artificial Sequence: Synthetic polynucleotide"
gcctgagtcgcgccgccgcctcccaaagacttctgggaaggcggtgcggctcaggctccgccccgcttccggggatatttgcatacgagcattcccagtaattcccagcagccactgtagctatatttggtagaataacgagcactttctgaactccagttaataactgcgttagttgcgttacacattggactaaaacaaatagaagttgaatctctagagcagtggagataagtcgccgtatgtgtacagaaattgcttccgggggctataaatagctggtagtggggctagaacgtc

SEQ ID NO: 352 - DNA, 300 bp, Artificial Sequence
  source: /note="Description of Artificial Sequence: Synthetic polynucleotide"
cgcccgcgcagcgcagccgcttcccagagacttctgggacggcagcggctgcggctccgcccctcttccagtataatttgcatgcgaccatggattcccagcagccacctgagtcatatttggtggaacaaaaaccactttctcaatttcagtgaatgaccccatttggttaaggtattgttgcacaaatatcataaaagaagggacgaatggctgaaccggtttttaatggagttcgcccttagcgtaaaagagtttattctatgccctctaaatagttctgggatcaaccgtactact

SEQ ID NO: 353 - DNA, 111 bp, Artificial Sequence
  source: /note="Description of Artificial Sequence: Synthetic polynucleotide"
ccccttacccaaggtgccccgggcgctcatttgcatgtcccaccgctcaccgtaactaaaacaggtgagagactcccgtgccttataaggcctgtggacggaggcagttgc

SEQ ID NO: 354 - DNA, 111 bp, Artificial Sequence
  source: /note="Description of Artificial Sequence: Synthetic polynucleotide"
acagcctctcccagtgtgctttgcgctcatttgcatagagcacgactcaccctgtccttatggagccctaactccatggctataaatatctaaggggaggaagggtagatc

SEQ ID NO: 355 - DNA, 111 bp, Artificial Sequence
  source: /note="Description of Artificial Sequence: Synthetic polynucleotide"
ggctccgactccgccccgcttccggcttatttgcatacagcaatattcaccttcagtttaaggtggttcgctttctgcacttcaaataccgcggtggacagaccctgtttc

SEQ ID NO: 356 - DNA, 111 bp, Artificial Sequence
  source: /note="Description of Artificial Sequence: Synthetic polynucleotide"
gctcaggctccgccccgcttccggggatatttgcatacgagcatagtcgccgtatgtgtacagaaattgcttccgggggctataaatagctggtagtggggctagaacgtc

SEQ ID NO: 357 - DNA, 111 bp, Artificial Sequence
  source: /note="Description of Artificial Sequence: Synthetic polynucleotide"
gctgcggctccgcccctcttccagtataatttgcatgcgaccatgttcgcccttagcgtaaaagagtttattctatgccctctaaatagttctgggatcaaccgtactact

That which is claimed:

1. A polypeptide comprising an amino acid sequence selected from the group consisting of:
a) an amino acid sequence having at least 90% sequence identity to any one of SEQ ID NOs: 2 and 7-12; and
b) an amino acid sequence having at least 95% sequence identity to SEQ ID NO: 4 or 6;
wherein said polypeptide has deaminase activity.

2. The polypeptide of claim 1, comprising an amino acid sequence having 100% sequence identity to any one of SEQ ID NOs: 2, 4, and 6-12.

3. A nucleic acid molecule comprising a polynucleotide encoding a deaminase polypeptide, wherein the deaminase is encoded by a nucleotide sequence selected from the group consisting of:
a) a nucleotide sequence having at least 80% sequence identity to any one of SEQ ID NOs: 114-119;
b) a nucleotide sequence having at least 95% sequence identity to any one of SEQ ID NOs: 109, 111, and 113
c) a nucleotide sequence encoding an amino acid sequence having at least 90% sequence identity to any one of SEQ ID NOs: 2 and 7-12; and
d) a nucleotide sequence encoding an amino acid sequence having at least 95% sequence identity to SEQ ID NO: 4 or 6.

4. The nucleic acid molecule of claim 3, wherein the deaminase is encoded by a nucleotide sequence that has at least 90% sequence identity to any one of SEQ ID NOs: 114-119.

5. The nucleic acid molecule of claim 3, wherein the deaminase is encoded by a nucleotide sequence that has 100% sequence identity to any one of SEQ ID NOs: 109, 111, and 113-119.

6. The nucleic acid molecule of claim 3, wherein the deaminase polypeptide has an amino acid sequence having 100% sequence identity to any one of SEQ ID NOs: 2, 4, and 6-12.

7. The nucleic acid molecule of any one of claims 3-6, wherein said nucleic acid molecule further comprises a heterologous promoter operably linked to said polynucleotide.

8. A vector comprising said nucleic acid molecule of any one of claims 3-7.

9. A cell comprising said nucleic acid molecule of any one of claims 3-7 or said vector of claim 8.

10. A pharmaceutical composition comprising a pharmaceutically acceptable carrier and the polypeptide of claim 1 or 2, the nucleic acid molecule of any one of claims 3-7, the vector of claim 8, or the cell of claim 9.

11. A method for making a deaminase comprising culturing the cell of claim 9 under conditions in which the deaminase is expressed.

12. A method for making a deaminase comprising introducing into a cell the nucleic acid molecule of any of claims 3-7 or a vector of claim 8 and culturing the cell under conditions in which the deminase is expressed.

13. The method of claim 11 or 12, further comprising purifying said deaminase.

14. A fusion protein comprising a DNA-binding polypeptide and a deaminase having an amino acid sequence selected from the group consisting of:
a) an amino acid sequence having at least 90% sequence identity to any one of SEQ ID NOs: 2 and 7-12; and
b) an amino acid sequence having at least 95% sequence identity to SEQ ID NO: 4 or 6.

15. The fusion protein of claim 14, wherein said deaminase has 100% sequence identity to any one of SEQ ID NOs: 2, 4, and 6-12.

16. The fusion protein of claim 14 or 15, wherein the deaminase is a cytosine deaminase.

17. The fusion protein of any one of claims 14-16, wherein the DNA-binding polypeptide is a meganuclease, a zinc finger fusion protein, or a TALEN; or a variant of a meganuclease, a zinc finger fusion protein, or a TALEN, wherein the nuclease activity has been reduced or inhibited.

18. The fusion protein of any one of claims 14-16, wherein the DNA-binding polypeptide is an RNA-guided, DNA-binding polypeptide.

19. The fusion protein of claim 18, wherein the RNA-guided, DNA-binding polypeptide is an RNA-guided nuclease (RGN) polypeptide.

20. The fusion protein of claim 19, wherein the RGN is a Type II or Type V CRISPR-Cas polypeptide.

21. The fusion protein of claim 19 or 20, wherein the RGN is an RGN nickase.

22. The fusion protein of claim 21, wherein the RGN nickase has an inactive RuvC domain.

23. The fusion protein of claim 19 or 20, wherein the RGN is a nuclease-inactive RGN.

24. The fusion protein of claim 19, wherein the RGN has an amino acid sequence having at least 90% sequence identity to any one of the RGN sequences in Table 1.

25. The fusion protein of claim 19, wherein the RGN has an amino acid sequence of any one of the RGN sequences in Table 1.

26. The fusion protein of claim 19, wherein the RGN has an amino acid sequence having at least 90% sequence identity to any one of SEQ ID NOs: 74, 82, 87, 106, and 107.

27. The fusion protein of claim 19, wherein the RGN has an amino acid sequence of any one of SEQ ID NOs: 74, 82, 87, 106, and 107.

28. The fusion protein of claim 21, wherein the RGN nickase has an amino acid sequence having at least 90% sequence identity to any one of SEQ ID NOs: 75 and 88-98.

29. The fusion protein of claim 21, wherein the RGN nickase has an amino acid sequence having any one of SEQ ID NOs: 75 and 88-98.

30. The fusion protein of any of claims 14-29, wherein the fusion protein further comprises at least one nuclear localization signal (NLS).

31. The fusion protein of any one of claims 14-30, wherein said fusion protein further comprises a uracil stabilizing protein (USP).

32. The fusion protein of claim 31, wherein said USP has the sequence set forth as SEQ ID NO: 81.

33. The fusion protein of claim 14, wherein said fusion protein has an amino acid sequence of any one of SEQ ID NOs: 67, 68, 146, and 147.

34. A nucleic acid molecule comprising a polynucleotide encoding a fusion protein comprising a DNA-binding polypeptide and a deaminase, wherein the deaminase is encoded by a nucleotide sequence selected from the group consisting of:
a) a nucleotide sequence having at least 80% sequence identity to any one of SEQ ID NOs: 114-119;
b) a nucleotide sequence having at least 95% sequence identity to any one of SEQ ID NOs: 109, 111, and 113;
c) a nucleotide sequence encoding an amino acid sequence having at least 90% sequence identity to any one of SEQ ID NOs: 2 and 7-12; and
d) a nucleotide sequence encoding an amino acid sequence having at least 95% sequence identity to SEQ ID NO: 4 or 6.

35. The nucleic acid molecule of claim 34, wherein said deaminase is encoded by a nucleotide sequence has at least 90% sequence identity to any one of SEQ ID NOs: 114-119.

36. The nucleic acid molecule of claim 34, wherein said deaminase nucleotide sequence has 100% sequence identity to any one of SEQ ID NOs: 109, 111, and 113-119.

37. The nucleic acid molecule of claim 34, wherein said deaminase nucleotide sequence encodes an amino acid sequence having 100% sequence identity to any one of SEQ ID NOs: 2, 4, and 6-12.

38. The nucleic acid molecule of any one of claims 34-37, wherein the deaminase is a cytosine deaminase.

39. The nucleic acid molecule of any one of claims 34-38, wherein the DNA-binding polypeptide is a meganuclease, a zinc finger fusion protein, or a TALEN; or a variant of a meganuclease, a zinc finger fusion protein, or a TALEN, wherein the nuclease activity has been reduced or inhibited.

40. The nucleic acid molecule of any one of claims 34-38, wherein the DNA-binding polypeptide is an RNA-guided, DNA-binding polypeptide.

41. The nucleic acid molecule of claim 40, wherein the RNA-guided, DNA-binding polypeptide is an RNA-guided nuclease (RGN) polypeptide.

42. The nucleic acid molecule of claim 41, wherein the RGN is a Type II or Type V CRISPR-Cas polypeptide.

43. The nucleic acid molecule of claim 41 or 42, wherein the RGN is an RGN nickase.

44. The nucleic acid molecule of claim 43, wherein said RGN nickase has an inactive RuvC domain.

45. The nucleic acid molecule of claim 41 or 42, wherein the RGN is a nuclease-inactive RGN.

46. The nucleic acid molecule of claim 41, wherein the RGN has an amino acid sequence having at least 90% sequence identity to any one of the RGN sequences in Table 1.

47. The nucleic acid molecule of claim 41, wherein the RGN has an amino acid sequence of any one of the RGN sequences in Table 1.

48. The nucleic acid molecule of claim 41, wherein the RGN has an amino acid sequence having at least 90% sequence identity to any one of SEQ ID NOs: 74, 82, 87, 106, and 107.

49. The nucleic acid molecule of claim 41, wherein the RGN has an amino acid sequence of any one of SEQ ID NOs: 74, 82, 87, 106, and 107.

50. The nucleic acid molecule of claim 43, wherein the RGN nickase has an amino acid sequence having at least 90% sequence identity to any one of SEQ ID NOs: 75 and 88-98.

51. The nucleic acid molecule of claim 43, wherein the RGN nickase has an amino acid sequence having any one of SEQ ID NOs: 75 and 88-98.

52. The nucleic acid molecule of any of claims 34-51, wherein the polynucleotide encoding the fusion protein is operably linked at its 5′ end to a promoter.

53. The nucleic acid molecule of any of claims 34-52, wherein the polynucleotide encoding the fusion protein is operably linked at its 3′ end to a terminator.

54. The nucleic acid molecule of any of claims 34-53, wherein the fusion protein comprises one or more nuclear localization signals.

55. The nucleic acid molecule of any of claims 34-54, wherein the fusion protein is codon optimized for expression in a eukaryotic cell.

56. The nucleic acid molecule of any of claims 34-55, wherein the fusion protein is codon optimized for expression in a prokaryotic cell.

57. The nucleic acid molecule of any one of claims 34-56, wherein said fusion protein further comprises a uracil stabilizing protein (USP).

58. The nucleic acid molecule of claim 57, wherein said USP has the sequence set forth as SEQ ID NO: 81.

59. The nucleic acid molecule of claim 34, wherein said fusion protein has an amino acid sequence set forth as any one of SEQ ID NOs: 67, 68, 146, and 147.

60. A vector comprising the nucleic acid molecule of any one of claims 34-59.

61. The vector of claim 60, further comprising at least one nucleotide sequence encoding a guide RNA (gRNA) capable of hybridizing to a target sequence.

62. A cell comprising the fusion protein of any of claims 14-33.

63. The cell of claim 62, wherein the cell further comprises a guide RNA.

64. A cell comprising the nucleic acid molecule of any one of claims 34-59.

65. A cell comprising the vector of claims of claim 60 or 61.

66. A pharmaceutical composition comprising a pharmaceutically acceptable carrier and the fusion protein of any one of claims 14-33, the nucleic acid molecule of any one of claims 34-59, the vector of claim 60 or 61, or the cell of any one of claims 62-65.

67. A method for making a fusion protein comprising culturing the cell of any one of claims 62-65 under conditions in which the fusion protein is expressed.

68. A method for making a fusion protein comprising introducing into a cell the nucleic acid molecule of any of claims 34-59 or a vector of claim 60 or 61 and culturing the cell under conditions in which the fusion protein is expressed.

69. The method of claim 67 or 68, further comprising purifying said fusion protein.

70. A method for making an RGN fusion ribonucleoprotein complex, comprising introducing into a cell the nucleic acid molecule of any one of claims 34-59 and a nucleic acid molecule comprising an expression cassette encoding a guide RNA, or the vector of claim 60 or 61, and culturing the cell under conditions in which the fusion protein and the gRNA are expressed and form an RGN fusion ribonucleoprotein complex.

71. The method of claim 70, further comprising purifying said RGN fusion ribonucleoprotein complex.

72. A system for modifying a target DNA molecule comprising a target DNA sequence, said system comprising:
a) a fusion protein or a nucleotide sequence encoding said fusion protein, wherein said fusion protein comprises an RNA-guided nuclease polypeptide (RGN) and a deaminase, wherein the deaminase has an amino acid sequence selected from the group consisting of:
i) an amino acid sequence having at least 90% sequence identity to any one of SEQ ID NOs: 2 and 7-12; and
ii) an amino acid sequence having at least 95% sequence identity to SEQ ID NO: 4 or 6; and
b) one or more guide RNAs capable of hybridizing to said target DNA sequence or one or more nucleotide sequences encoding the one or more guide RNAs (gRNAs); and
wherein the one or more guide RNAs are capable of forming a complex with the fusion protein in order to direct said fusion protein to bind to said target DNA sequence and modify the target DNA molecule.

73. The system of claim 72, wherein said deaminase has an amino acid sequence having 100% sequence identity to any one of SEQ ID NOs: 2, 4, and 6-12.

74. The system of claim 72 or 73, wherein at least one of said nucleotide sequence encoding the one or more guide RNAs and said nucleotide sequence encoding the fusion protein is operably linked to a promoter.

75. The system of any one of claims 72-74, wherein the target DNA sequence is located adjacent to a protospacer adjacent motif (PAM) that is recognized by the RGN.

76. The system of any one of claims 72-75, wherein the target DNA molecule is within a cell.

77. The system of any one of claims 72-76, wherein the RGN of the fusion protein is a Type II or Type V CRISPR-Cas polypeptide.

78. The system of any one of claims 72-76, wherein the RGN of the fusion protein has an amino acid sequence having at least 90% sequence identity to any one of the RGN sequences in Table 1.

79. The system of any one of claims 72-76, wherein the RGN of the fusion protein has an amino acid sequence of any one of the RGN sequences in Table 1.

80. The system of any one of claims 72-76, wherein the RGN of the fusion protein has an amino acid sequence having at least 90% sequence identity to any one of SEQ ID NOs: 74, 82, 87, 106, and 107.

81. The system of any one of claims 72-76, wherein the RGN of the fusion protein has an amino acid sequence of any one of SEQ ID NOs: 74, 82, 87, 106, and 107.

82. The system of any one of claims 72-76, wherein the RGN of the fusion protein is an RGN nickase.

83. The system of claim 82, wherein the RGN nickase has an inactive RuvC domain.

84. The system of claim 82 or 83, wherein the RGN nickase has an amino acid sequence having at least 90% sequence identity to any one of SEQ ID NOs: 75 and 88-98.

85. The system of claim 82 or 83, wherein the RGN nickase is any one of SEQ ID NOs: 75 and 88-98.

86. The system of any one of claims 72-76, wherein the RGN of the fusion protein is a nuclease-inactive RGN.

87. The system of any of claims 72-86, wherein the fusion protein comprises one or more nuclear localization signals.

88. The system of any one of claims 72-87, wherein said fusion protein further comprises a uracil stabilizing protein (USP).

89. The system of claim 88, wherein said USP has the sequence set forth as SEQ ID NO: 81.

90. The system of claim 72, wherein the fusion protein has an amino acid sequence set forth as any one of SEQ ID NOs: 67, 68, 146, and 147.

91. The system of any of claims 72-90, wherein the fusion protein is codon optimized for expression in a eukaryotic cell.

92. The system of any of claims 72-91, wherein nucleotide sequences encoding the one or more guide RNAs and the nucleotide sequence encoding a fusion protein are located on one vector.

93. A ribonucleoprotein complex comprising said at least one guide RNA and said fusion protein of the system of any one of claims 72-92.

94. A cell comprising the system of any one of claims 72-92 or the ribonucleoprotein complex of claim 93.

95. A pharmaceutical composition comprising a pharmaceutically acceptable carrier and the system of any one of claims 72-92, the ribonucleoprotein complex of claim 93, or the cell of claim 94.

96. A method for modifying a target DNA molecule comprising a target DNA sequence, said method comprising delivering a system according to any one of claims 72-92 or a ribonucleoprotein complex of claim 93 to said target DNA molecule or a cell comprising the target DNA molecule.

97. The method of claim 96, wherein said modified target DNA molecule comprises a C>N mutation of at least one nucleotide within the target DNA molecule, wherein N is A, G, or T.

98. The method of claim 97, wherein said modified target DNA molecule comprises an C>T mutation of at least one nucleotide within the target DNA molecule.

99. The method of claim 97, wherein said modified target DNA molecule comprises an C>G mutation of at least one nucleotide within the target DNA molecule.

100. A method for modifying a target DNA molecule comprising a target sequence, said method comprising:
a) assembling an RGN-deaminase ribonucleotide complex in vitro by combining:
i) one or more guide RNAs capable of hybridizing to the target DNA sequence; and
ii) a fusion protein comprising an RNA-guided nuclease polypeptide (RGN), and at least one deaminase, wherein the deaminase has an amino acid sequence selected from the group consisting of:
I) an amino acid sequence having at least 90% sequence identity to any one of SEQ ID NOs: 2 and 7-12; and
II) an amino acid sequence having at least 95% sequence identity to SEQ ID NO: 4 or 6;
under conditions suitable for formation of the RGN-deaminase ribonucleotide complex; and
b) contacting said target DNA molecule or a cell comprising said target DNA molecule with the in vitro-assembled RGN-deaminase ribonucleotide complex;
wherein the one or more guide RNAs hybridize to the target DNA sequence, thereby directing said fusion protein to bind to said target DNA sequence and modification of the target DNA molecule occurs.

101. The method of claim 100, wherein said deaminase has an amino acid sequence having 100% sequence identity to any one of SEQ ID NOs: 2, 4, and 6-12.

102. The method of claim 100 or 101, wherein said modified target DNA molecule comprises a C>N mutation of at least one nucleotide within the target DNA molecule, wherein N is A, G, or T.

103. The method of claim 102, wherein said modified target DNA molecule comprises a C>T mutation of at least one nucleotide within the target DNA molecule.

104. The method of claim 102, wherein said modified target DNA molecule comprises a C>G mutation of at least one nucleotide within the target DNA molecule.

105. The method of any one of claims 100-104, wherein the RGN of the fusion protein is a Type II or Type V CRISPR-Cas polypeptide.

106. The method of any one of claims 100-104, wherein the RGN of the fusion protein has an amino acid sequence having at least 90% sequence identity to any one of the RGN sequences in Table 1.

107. The method of any one of claims 100-104, wherein the RGN of the fusion protein has an amino acid sequence of any one of the RGN sequences in Table 1.

108. The method of any one of claims 100-104, wherein the RGN of the fusion protein has an amino acid sequence having at least 90% sequence identity to any one of SEQ ID NOs: 74, 82, 87, 106, and 107.

109. The method of any one of claims 100-104, wherein the RGN of the fusion protein has an amino acid sequence of any one of SEQ ID NOs: 74, 82, 87, 106, and 107.

110. The method of any of claims 100-104, wherein the RGN of the fusion protein is an RGN nickase.

111. The method of claim 110, wherein said RGN nickase has an inactive RuvC domain.

112. The method of claim 110 or 111, wherein said RGN nickase has an amino acid sequence having at least 90% sequence identity to any one of SEQ ID NOs: 75 and 88-98.

113. The method of claim 110 or 111, wherein the RGN nickase is any one of SEQ ID NOs: 75 and 88-98.

114. The method of any one of claims 100-104, wherein the RGN of the fusion protein is a nuclease-inactive RGN.

115. The method of any of claims 100-114, wherein the fusion protein comprises one or more nuclear localization signals.

116. The method of any one of claims 100-115, wherein said fusion protein further comprises a uracil stabilizing protein (USP).

117. The method of claim 116, wherein said USP has the sequence set forth as SEQ ID NO: 81.

118. The method of claim 100, wherein said fusion protein has an amino acid sequence set forth as any one of SEQ ID NOs: 67, 68, 146, and 147.

119. The method of any of claims 100-118, wherein said target DNA sequence is located adjacent to a protospacer adjacent motif (PAM).

120. The method of any of claims 100-119, wherein the target DNA molecule is within a cell.

121. The method of claim 120, further comprising selecting a cell comprising said modified DNA molecule.

122. A cell comprising a modified target DNA sequence according to the method of claim 121.

123. A pharmaceutical composition comprising the cell of claim 122, and a pharmaceutically acceptable carrier.

124. A method for producing a genetically modified cell with a correction in a causal mutation for a genetically inherited disease, the method comprising introducing into the cell:
a) a fusion protein or a polynucleotide encoding said fusion protein, wherein said fusion protein comprises an RNA-guided nuclease polypeptide (RGN) and a deaminase, wherein the deaminase has an amino acid sequence selected from the group consisting of:
i) an amino acid sequence having at least 90% sequence identity to any one of SEQ ID NOs: 2 and 7-12; and
ii) an amino acid sequence having at least 95% sequence identity to SEQ ID NO: 4 or 6; and
b) one or more guide RNAs (gRNA) capable of hybridizing to a target DNA sequence, or a polynucleotide encoding said gRNA;
whereby the fusion protein and gRNA target to the genomic location of the causal mutation and modify the genomic sequence to remove the causal mutation.

125. The method of claim 124, wherein said deaminase has an amino acid sequence having 100% sequence identity to any one of SEQ ID NOs: 2, 4, and 6-12.

126. The method of claim 124 or 125, wherein the RGN of the fusion protein is a Type II or Type V CRISPR-Cas polypeptide.

127. The method of any one of claims 124-126, wherein the RGN of the fusion protein has an amino acid sequence having at least 90% sequence identity to any one of the RGN sequences in Table 1.

128. The method of any one of claims 124-126, wherein the RGN of the fusion protein has an amino acid sequence of any one of the RGN sequences in Table 1.

129. The method of any of claims 124-126, wherein the RGN of the fusion protein is an RGN nickase.

130. The method of claim 129, wherein said RGN nickase has an inactive RuvC domain.

131. The method of claim 129 or 130, wherein the RGN nickase has an amino acid sequence having at least 90% sequence identity to any one of SEQ ID NOs: 75 and 88-98.

132. The method of claim 129 or 130, wherein the RGN nickase is any one of SEQ ID NOs: 75 and 88-98.

133. The method of any one of claims 124-126, wherein the RGN of the fusion protein is a nuclease-inactive RGN.

134. The method of any of claims 124-133, wherein the fusion protein comprises one or more nuclear localization signals.

135. The method of any one of claims 124-134, wherein said fusion protein further comprises a uracil stabilizing protein (USP).

136. The method of claim 135, wherein said USP has the sequence set forth as SEQ ID NO: 81.

137. The method of claim 124, wherein said fusion protein has an amino acid sequence set forth as any one of SEQ ID NOs: 67, 68, 146, and 147.

138. The method of any one of claims 124-137, wherein the genome modification comprises introducing a C>T mutation of at least one nucleotide within the target DNA sequence.

139. The method of any one of claims 124-137, wherein the genome modification comprises introducing a C>G mutation of at least one nucleotide within the target DNA sequence.

140. The method of any of claims 124-139, wherein the cell is an animal cell.

141. The method of any one of claims 124-140, wherein the correction of the causal mutation comprises correcting a nonsense mutation.

142. The method of any one of claims 124-140, wherein the genetically inherited disease is a disease listed in Table 23.

143. A method for treating a disease, said method comprising administering to a subject in need thereof the fusion protein of any one of claims 14-33, the nucleic acid molecule of any one of claims 34-59, the vector of claim 60 or 61, the cell of any one of claims 62-65, 94, and 122, the system of any one of claims 72-92, the ribonucleoprotein complex of claim 93, or the pharmaceutical composition of any one of claims 66, 95, and 123.

144. The method of claim 143, wherein said disease is associated with a causal mutation and said pharmaceutical composition corrects said causal mutation.

145. The method of claim 143 or 144, wherein said disease is a disease a disease listed in Table 23.

146. Use of the fusion protein of any one of claims 14-33, the nucleic acid molecule of any one of claims 34-59, the vector of claim 60 or 61, the cell of any one of claims 62-65, 94, and 122, the system of any one of claims 72-92, or the ribonucleoprotein complex of claim 93 for the treatment of a disease in a subject.

147. The use of claim 146, wherein said disease is associated with a causal mutation and said treating comprises correcting said causal mutation.

148. The use of claim 146 or 147, wherein said disease is a disease listed in Table 23.

149. Use of the fusion protein of any one of claims 14-33, the nucleic acid molecule of any one of claims 34-59, the vector of claim 60 or 61, the cell of any one of claims 62-65, 94, and 122, the system of any one of claims 72-92, or the ribonucleoprotein complex of claim 93 for the manufacture of a medicament useful for treating a disease.

150. The use of claim 149, wherein said disease is associated with a causal mutation and an effective amount of said medicament corrects said causal mutation.

151. The use of claim 149 or 150, wherein said disease is a disease listed in Table 23.
